(19) United States
(12) Patent Application Publication
(10) Pub. No.: US 2026/0055409 A1
(43) Pub. Date: Feb. 26, 2026

(54) COMPOUNDS AND METHODS FOR TREATING HUMAN SUBJECTS

(71) Applicant: Stoke Therapeutics, Inc., Bedford, MA (US)

(72) Inventors: Isabel Aznarez, Jamaica Plain, MA (US); Sethumadhavan Divakaramenon, Lexington, MA (US); Juergen Scharner, Arlington, MA (US); Hyun-Yong Jeon, Arlington, MA (US)

(21) Appl. No.: 19/372,895

(22) Filed: Oct. 29, 2025

Related U.S. Application Data
(63) Continuation of application No. PCT/US2024/027823, filed on May 3, 2024.
(60) Provisional application No. 63/499,779, filed on May 3, 2023.

(51) Int. Cl. C12N 15/113

(52) U.S. Cl. CPC C12N 15/113; C12N 2310/14; C12N 2310/315; C12N 2310/321; C12N 2320/33

(57) ABSTRACT

Described herein are compounds and methods that can be used to treat a disease or condition by increasing SYNGAP1 protein.

### CROSS-REFERENCE

[0001] This application is a continuation of International Application No. PCT/US2024/027823, filed May 3, 2024, which claims benefit of U.S. Provisional Patent Application No. 63/499,779 filed May 3, 2023, each of which is incorporated herein by reference in its entirety.

### SEQUENCE LISTING

[0002] The instant application contains a Sequence Listing which has been submitted electronically in XML format and is hereby incorporated by reference in its entirety. Said XML copy, created on Oct. 29, 2025, is named 47991-740_301_SL.xml and is 2,793,768 bytes in size.

### BACKGROUND

[0003] Deficient SYNGAP1 protein or activity has been observed in subjects with mental retardation, or intellectual disability, epileptic encephalopathy, or autism. There is a need for therapeutic agents that can be used to treat such conditions or diseases by increasing SYNGAP1 protein or activity.

### SUMMARY

[0004] Provided herein are therapeutic agents that can be used to increase SYNGAP1 protein or activity and treat conditions or diseases.

[0005] Provided herein is a compound of Formula (I):

[chemical structure]

[0006] wherein
[0007] X_{A} is

[chemical structure]

### and B_{A} is

[chemical structure]

### X₂ is

[chemical structure]

[0008] X₃ is

[chemical structure]

### X₄ is

[chemical structure]

### X₅ is

[chemical structure]

[0009] X₆ is

[chemical structure]

### X₇ is

[chemical structure]

### X₈ is

[chemical structure]

[0010] X₉ is

[chemical structure]

### X₁₀ is

[chemical structure]

### X₁₁ is

[chemical structure]

### X₁₂ is

[chemical structure]

[0011] X₁₃ is

[chemical structure]

### X₁₄ is

[chemical structure]

[0012] X₁₅ is

[chemical structure]

### X₁₆ is

[chemical structure]

### X₁₇ is

[chemical structure]

### X_{B} is

[chemical structure]

### and B_{B} is

[chemical structure]

[0013] In some embodiments,
[0014] X₂ is

[chemical structure]

### X₅ is

[chemical structure]

### X₇ is

[chemical structure]

### X₈ is

[chemical structure]

[0015] X₉ is

[chemical structure]

### X₁₀ is

[chemical structure]

### X₁₁ is

[chemical structure]

### X₁₂ is

[chemical structure]

[0016] X₁₄ is

[chemical structure]

### X₁₆ is

[chemical structure]

### and X_{B} is

[chemical structure]

### and B_{B} is

[chemical structure]

[0017] In some embodiments,
[0018] X₂ is

[chemical structure]

### X₅ is

[chemical structure]

### X₇ is

[chemical structure]

### X₈ is

[chemical structure]

[0019] X₉ is

[chemical structure]

### X₁₀ is

[chemical structure]

### X₁₁ is

[chemical structure]

### X₁₂ is

[chemical structure]

[0020] X₁₄ is

[chemical structure]

### X₁₆ is

[chemical structure]

### and X_{B} is

[chemical structure]

[0021] In some embodiments,
[0022] X₂ is

[chemical structure]

### X₅ is

[chemical structure]

### X₇ is

[chemical structure]

### X₈ is

[chemical structure]

[0023] X₉ is

[chemical structure]

### X₁₀ is

[chemical structure]

### X₁₁ is

[chemical structure]

[0024] X₁₂ is

[chemical structure]

### X₁₄ is

[chemical structure]

### X₁₆ is

[chemical structure]

### and X_{B} is

[chemical structure]

[0025] In some embodiments,
[0026] X₂ is

[chemical structure]

### X₅ is

[chemical structure]

### X₇ is

[chemical structure]

### X₈ is

[chemical structure]

[0027] X₉ is

[chemical structure]

### X₁₀ is

[chemical structure]

### X₁₁ is

[chemical structure]

### X₁₂ is

[chemical structure]

[0028] X₁₄ is

[chemical structure]

### X₁₆ is

[chemical structure]

### and X_{B} is

[chemical structure]

[0029] In some embodiments,
[0030] X₂ is

[chemical structure]

### X₅ is

[chemical structure]

### X₇ is

[chemical structure]

### X₈ is

[chemical structure]

[0031] X₉ is

[chemical structure]

### X₁₀ is

[chemical structure]

### X₁₁ is

[chemical structure]

### X₁₂ is

[chemical structure]

[0032] X₁₄ is

[chemical structure]

### X₁₆ is

[chemical structure]

### and X_{B} is

[chemical structure]

[0033] In some embodiments,
[0034] X₂ is

[chemical structure]

### X₅ is

[chemical structure]

### X₇ is

[chemical structure]

### X₈ is

[chemical structure]

[0035] X₉ is

[chemical structure]

### X₁₀ is

[chemical structure]

### X₁₁ is

[chemical structure]

### X₁₂ is

[chemical structure]

[0036] X₁₄ is

[chemical structure]

### X₁₆ is

[chemical structure]

### and X_{B} is

[chemical structure]

[0037] In some embodiments,
[0038] X₂ is

[chemical structure]

### X₅ is

[chemical structure]

### X₇ is

[chemical structure]

### X₈ is

[chemical structure]

[0039] X₉ is

[chemical structure]

### X₁₀ is

[chemical structure]

### X₁₁ is

[chemical structure]

[0040] X₁₂ is

[chemical structure]

### X₁₄ is

[chemical structure]

### X₁₆ is

[chemical structure]

### and X_{B} is

[chemical structure]

[0041] Provided herein is a compound of Formula (I):

(SEQ ID NO: 1)
X_{A}X₂X₃X₄X₅X₆X₇X₈X₉X₁₀X₁₁X₁₂X₁₃X₁₄X₁₅X₁₆X₁₇X_{B}

wherein
[0042] X_{A} is

[chemical structure]

### and B_{A} is

[chemical structure]

### X₂ is

[chemical structure]

### X₃ is

[chemical structure]

[0043] X₄ is

[chemical structure]

### X₅ is

[chemical structure]

### X₆ is

[chemical structure]

### X₇ is

[chemical structure]

[0044] X₈ is

[chemical structure]

### X₉ is

[chemical structure]

### X₁₀ is

[chemical structure]

### X₁₁ is

[chemical structure]

[0045] X₁₂ is

[chemical structure]

### X₁₃ is

[chemical structure]

### X₁₄ is

[chemical structure]

### X₁₅ is

[chemical structure]

[0046] X₁₆ is

[chemical structure]

### X₁₇ is

[chemical structure]

### and X_{B} is

[chemical structure]

### and B_{B} is

[chemical structure]

[0047] Provided herein is a compound of Formula (I):

(SEQ ID NO: 2)
X_{A}X₂X₃X₄X₅X₆X₇X₈X₉X₁₀X₁₁X₁₂X₁₃X₁₄X₁₅X_{B}

[0048] wherein
[0049] X_{A} is

[chemical structure]

### and B_{A} is

[chemical structure]

[0050] X₂ is

[chemical structure]

### X₃ is

[chemical structure]

### X₄ is

[chemical structure]

### X₅ is

[chemical structure]

[0051] X₆ is

[chemical structure]

### X₇ is

[chemical structure]

[0052] X₈ is

[chemical structure]

### X₉ is

[chemical structure]

### X₁₀ is

[chemical structure]

### X₁₁ is

[chemical structure]

### X₁₂ is

[chemical structure]

### X₁₃ is

[chemical structure]

### X₁₄ is

[chemical structure]

### X₁₅ is

[chemical structure]

### and X_{B} is

[chemical structure]

### and B_{B} is

[chemical structure]

[0053] In some embodiments,
[0054] X_{A} is

[chemical structure]

### X₇ is

[chemical structure]

### X₈ is

[chemical structure]

### X₉ is

[chemical structure]

[0055] X₁₀ is

[chemical structure]

### X₁₃ is

[chemical structure]

### and X_{B} is

[chemical structure]

[0056] In some embodiments,
[0057] X_{A} is

[chemical structure]

### X₇ is

[chemical structure]

### X₈ is

[chemical structure]

### X₉ is

[chemical structure]

[0058] X₁₀ is

[chemical structure]

### X₁₃ is

[chemical structure]

### and X_{B} is

[chemical structure]

[0059] In some embodiments,
[0060] X_{A} is

[chemical structure]

### X₇ is

[chemical structure]

### X₈ is

[chemical structure]

### X₉ is

[chemical structure]

[0061] X₁₀ is

[chemical structure]

### X₁₃ is

[chemical structure]

### and X_{B} is

[chemical structure]

[0062] In some embodiments,
[0063] X_{A} is

[chemical structure]

### X₇ is

[chemical structure]

### X₈ is

[chemical structure]

### X₉ is

[chemical structure]

### X₁₀ is

[chemical structure]

### X₁₃ is

[chemical structure]

### and X_{B} is

[chemical structure]

[0064] In some embodiments,
[0065] X_{A} is

[chemical structure]

### X₇ is

[chemical structure]

### X₈ is

[chemical structure]

[0066] X₉ is

[chemical structure]

### X₁₀ is

[chemical structure]

### X₁₃ is

[chemical structure]

### and X_{B} is

[chemical structure]

[0067] In some embodiments,
[0068] X_{A} is

[chemical structure]

### X₇ is

[chemical structure]

### X₈ is

[chemical structure]

### X₉ is

[chemical structure]

[0069] X₁₀ is

[chemical structure]

### X₁₃ is

[chemical structure]

### and X_{B} is

[chemical structure]

[0070] In some embodiments,
[0071] X_{A} is

[chemical structure]

### X₇ is

[chemical structure]

### X₈ is

[chemical structure]

### X₉ is

[chemical structure]

[0072] X₁₀ is

[chemical structure]

### X₁₃ is

[chemical structure]

### and X_{B} is

[chemical structure]

[0073] In some embodiments,
[0074] X_{A} is

[chemical structure]

### X₇ is

[chemical structure]

### X₈ is

[chemical structure]

### X₉ is

[chemical structure]

[0075] X₁₀ is

[chemical structure]

### X₁₃ is

[chemical structure]

### and X_{B} is

[chemical structure]

[0076] Provided herein is a compound of Formula (I):

(SEQ ID NO: 3)
X_{A}X₂X₃X₄X₅X₆X₇X₈X₉X₁₀X₁₁X₁₂X₁₃X₁₄X₁₅X_{B}

[0077] wherein
[0078] X_{A} is

[chemical structure]

### and B_{A} is

[chemical structure]

### X₂ is

[chemical structure]

### X₃ is

[chemical structure]

[0079] X₄ is

[chemical structure]

### X₅ is

[chemical structure]

### X₆ is

[chemical structure]

### X₇ is

[chemical structure]

[0080] X₈ is

[chemical structure]

### X₉ is

[chemical structure]

### X₁₀ is

[chemical structure]

### X₁₁ is

[chemical structure]

[0081] X₁₂ is

[chemical structure]

### X₁₃ is

[chemical structure]

or absent, X₁₄ is

[chemical structure]

or absent;
[0082] X₁₅ is

[chemical structure]

or absent; and X_{B} is

[chemical structure]

### and B_{B} is

[chemical structure]

when each of X₁₃ X₁₄ and X₁₅ is absent,

[chemical structure]

when X₁₃ is

[chemical structure]

and each of X₁₄ and X₁₅ is absent,

[chemical structure]

when X₁₃ is

[chemical structure]

### X₁₄ is

[chemical structure]

and X₁₅ is absent, or

[chemical structure]

when X₁₃ is

[chemical structure]

### X₁₄ is

[chemical structure]

### and X₁₅ is

[chemical structure]

[0083] In some embodiments,
[0084] X₁₃ is

[chemical structure]

### X₁₄ is

[chemical structure]

### and X₁₅ is

[chemical structure]

[0085] In some embodiments,
[0086] X₁₃ is

[chemical structure]

### X₁₄ is

[chemical structure]

and X₁₅ is absent.

[0087] In some embodiments,
[0088] X₁₃ is

[chemical structure]

and each of X₁₄ and X₁₅ is absent.

[0089] In some embodiments, each of X₁₃, X₁₄, and X₁₅ is absent.

[0090] Provided herein is a compound of Formula (I):

(SEQ ID NO: 4)
X_{A}X₂X₃X₄X₅X₆X₇X₈X₉X₁₀X₁₁X₁₂X₁₃X₁₄X₁₅X_{B}

[0091] wherein
[0092] X_{A} is

[chemical structure]

### and B_{A} is

[chemical structure]

### X₂ is

[chemical structure]

### X₃ is

[chemical structure]

[0093] X₄ is

[chemical structure]

### X₅ is

[chemical structure]

### X₆ is

[chemical structure]

### X₇ is

[chemical structure]

[0094] X₈ is

[chemical structure]

### X₉ is

[chemical structure]

### X₁₀ is

[chemical structure]

### X₁₁ is

[chemical structure]

[0095] X₁₂ is

[chemical structure]

### X₁₃ is

[chemical structure]

### and X₁₄ is

[chemical structure]

### X₁₅ is

[chemical structure]

[0096] X_{B} is

[chemical structure]

### and B_{B} is

[chemical structure]

[0097] Provided herein is a compound of Formula (I):

(SEQ ID NO: 5)
X_{A}X₂X₃X₄X₅X₆X₇X₈X₉X₁₀X₁₁X₁₂X₁₃X₁₄X_{B}

[0098] wherein:
[0099] X_{A} is

[chemical structure]

### and B_{A} is

[chemical structure]

### X₂ is

[chemical structure]

[0100] X₃ is

[chemical structure]

### X₄ is

[chemical structure]

### X₅ is

[chemical structure]

### X₆ is

[chemical structure]

[0101] X₇ is

[chemical structure]

### X₈ is

[chemical structure]

### X₉ is

[chemical structure]

### X₁₀ is

[chemical structure]

[0102] X₁₁ is

[chemical structure]

### X₁₂ is

[chemical structure]

### X₁₃ is

[chemical structure]

### X₁₄ is

[chemical structure]

and
[0103] X_{B} is

[chemical structure]

### and B_{B} is

[chemical structure]

[0104] Provided herein is a compound of Formula (I):

(SEQ ID NO: 6)
X_{A}X₂X₃X₄X₅X₆X₇X₈X₉X₁₀X₁₁X₁₂X₁₃X_{B}

[0105] wherein
[0106] X_{A} is

[chemical structure]

### and B_{A} is

[chemical structure]

### X₂ is

[chemical structure]

[0107] X₃ is

[chemical structure]

### X₄ is

[chemical structure]

### X₅ is

[chemical structure]

### X₆ is

[chemical structure]

[0108] X₇ is

[chemical structure]

### X₈ is

[chemical structure]

### X₉ is

[chemical structure]

### X₁₀ is

[chemical structure]

[0109] X₁₁ is

[chemical structure]

### X₁₂ is

[chemical structure]

### X₁₃ is

[chemical structure]

### and X_{B} is

[chemical structure]

[0110] and B_{B} is

[chemical structure]

[0111] Provided herein is a compound of Formula (I):

[chemical structure]

wherein
[0112] X_{A} is

[chemical structure]

### and B_{A} is

[chemical structure]

[0113] X₂ is

[chemical structure]

### X₃ is

[chemical structure]

### X₄ is

[chemical structure]

### X₅ is

[chemical structure]

[0114] X₆ is

[chemical structure]

### X₇ is

[chemical structure]

### X₈ is

[chemical structure]

### X₉ is

[chemical structure]

### X₁₀ is

[chemical structure]

[0115] X₁₁ is

[chemical structure]

### X₁₂ is

[chemical structure]

### X₁₃ is

[chemical structure]

### X₁₄ is

[chemical structure]

### X₁₅ is

[chemical structure]

and
[0116] X_{B} is

[chemical structure]

### and B_{B} is

[chemical structure]

[0117] In some embodiments,
[0118] X_{A} is

[chemical structure]

### X₇ is

[chemical structure]

### X₈ is

[chemical structure]

### X₉ is

[chemical structure]

[0119] X₁₀ is

[chemical structure]

### X₁₂ is

[chemical structure]

### X₁₃ is

[chemical structure]

### and X_{B} is

[chemical structure]

[0120] In some embodiments,
[0121] X_{A} is

[chemical structure]

### X₇ is

[chemical structure]

### X₈ is

[chemical structure]

### X₉ is

[chemical structure]

[0122] X₁₀ is

[chemical structure]

### X₁₂ is

[chemical structure]

### X₁₃ is

[chemical structure]

### and X_{B} is

[chemical structure]

[0123] Also provided herein is a compound selected from the group consisting of (SEQ ID NOs: 7-16, 1, 18-25, and 25-29 disclosed below, respectively, in order of appearance):

[chemical structure]

[chemical structure]

[chemical structure]

[chemical structure]

[chemical structure]

[chemical structure]

[chemical structure]

[chemical structure]

[chemical structure]

[chemical structure]

[chemical structure]

[chemical structure]

[chemical structure]

[chemical structure]

[chemical structure]

[chemical structure]

[chemical structure]

[chemical structure]

[chemical structure]

[chemical structure]

[chemical structure]

[chemical structure]

[chemical structure]

[chemical structure]

[0124] In some aspects, provided herein is a composition comprising a nonsense-mediated RNA decay alternative exon (NSAE)-modulating agent that interacts with a target motif within a pre-processed mRNA transcript to modulate exclusion of an NSAE from a processed mRNA transcript and to modulate inclusion of a canonical exon in the processed mRNA transcript, wherein the target motif is located (i) in an intronic region between two canonical exons, (ii) in one of the two canonical exons, or (iii) in a region spanning both an intron and canonical exon; and wherein the NSAE comprises (i) only a portion of a canonical exon, or (ii) a canonical exon and at least a portion of an intron adjacent to the canonical exon; wherein the NSAE-modulating agent modulates exclusion of an NSAE from the processed mRNA transcript and modulates inclusion of a canonical exon in the processed mRNA transcript.

[0125] In some aspects, provided herein is a composition comprising a non-sense mediated RNA decay alternative exon (NSAE)-modulating agent that modulates expression of a target protein in a cell comprising a pre-processed mRNA transcript (pre-mRNA) that encodes the target protein and comprises: an alternative nonsense mediated RNA decay-inducing (NMD) exon comprising an alternative 5′ splice site downstream of the 5′ splice site of a canonical exon and within the canonical exon, or upstream of the 5′ splice site of the canonical exon and within an intron, wherein the NSAE-modulating agent modulates processing of an mRNA transcript from the pre-processed mRNA transcript by modulating splicing of the pre-mRNA at the 5′ alternative splice site, wherein the splicing of the pre-mRNA at the 5′ alternative splice site modulates the expression of the target protein in a cell.

[0126] In some aspects, provided herein is a composition comprising a non-sense mediated RNA decay alternative 5′ or 3′ splice site (NSASS)-modulating agent that interacts with a target motif within a pre-processed mRNA transcript to modulate splicing at an alternative 5′ or 3′ splice site of a pre-processed mRNA transcript and to modulate inclusion of a canonical exon in a processed mRNA transcript that is processed from the pre-processed mRNA transcript, wherein the target motif is located in an intronic region between two canonical exons, in one of the two canonical exons, or in a region spanning both an intron and canonical exon; wherein modulating splicing at the alternative 5′ or 3′ splice site of the pre-processed mRNA transcript modulates exclusion of an alternative exon from the processed mRNA transcript, wherein the alternative exon comprises only a portion of a canonical exon, or a canonical exon and at least a portion of an intron adjacent to the canonical exon; and wherein the NSASS-modulating agent modulates exclusion of the alternative exon from the processed mRNA transcript and modulates inclusion of a canonical exon in the processed mRNA transcript.

[0127] In some aspects, provided herein is a composition comprising a non-sense mediated RNA decay alternative 5′ or 3′ splice site (NSASS)-modulating agent that modulates expression of a target protein in a cell comprising a pre-processed mRNA transcript (pre-mRNA) that encodes the target protein, wherein the pre-mRNA comprises an alternative exon comprising an alternative 5′ splice site downstream of the 5′ splice site of a canonical exon and within the canonical exon, or upstream of the 5′ splice site of the canonical exon and within an intron; wherein the NSASS-modulating agent modulates processing of an mRNA transcript from the pre-processed mRNA transcript by modulating splicing of the pre-mRNA at the 5′ alternative splice site, wherein the splicing of the pre-mRNA at the 5′ alternative splice site modulates the expression of the target protein in a cell.

[0128] In some embodiments, the agent is a small molecule. In some embodiments the agent is a polypeptide. In some embodiments, the polypeptide is a nucleic acid binding protein. In some embodiments, the nucleic acid binding protein contains a TAL-effector or zinc finger binding domain. In some embodiments, the nucleic acid binding protein is a Cas family protein. In some embodiments, the polypeptide is accompanied by or complexed with one or more nucleic acid molecules. In some embodiments, the agent is an antisense oligomer (ASO) complementary to the targeted region of the pre-mRNA. In some embodiments, the agent is at least 75%, at least 80%, at least 85%, at least 90%, at least 95%, at least 98%, at least 99%, or 100%, complementary to the targeted region of the pre-mRNA encoding the target protein. In some embodiments, the agent is an antisense oligomer, and wherein the agent comprises a backbone modification comprising a phosphorothioate linkage or a phosphorodiamidate linkage. In some embodiments, the agent is an antisense oligomer, and wherein the agent comprises a phosphorodiamidate morpholino. In some embodiments, the agent is an antisense oligomer, and wherein the agent comprises a locked nucleic acid. In some embodiments, the agent is an antisense oligomer, and wherein the agent comprises a peptide nucleic acid. In some embodiments, the agent is an antisense oligomer, and wherein the agent comprises a 2′-O-methyl. In some embodiments, the agent is an antisense oligomer, and wherein the agent comprises a 2′-Fluoro, or a 2′-O-methoxyethyl moiety. In some embodiments, the agent is an antisense oligomer, and wherein the agent comprises at least one modified sugar moiety. In some embodiments, each sugar moiety is a modified sugar moiety. In some embodiments, the agent is an antisense oligomer, and wherein the agent consists of from 8 to 50 nucleobases, 8 to 40 nucleobases, 8 to 35 nucleobases, 8 to 30 nucleobases, 8 to 25 nucleobases, 8 to 20 nucleobases, 8 to 15 nucleobases, 9 to 50 nucleobases, 9 to 40 nucleobases, 9 to 35 nucleobases, 9 to 30 nucleobases, 9 to 25 nucleobases, 9 to 20 nucleobases, 9 to 15 nucleobases, 10 to 50 nucleobases, 10 to 40 nucleobases, 10 to 35 nucleobases, 10 to 30 nucleobases, 10 to 25 nucleobases, 10 to 20 nucleobases, 10 to 15 nucleobases, 11 to 50 nucleobases, 11 to 40 nucleobases, 11 to 35 nucleobases, 11 to 30 nucleobases, 11 to 25 nucleobases, 11 to 20 nucleobases, 11 to 15 nucleobases, 12 to 50 nucleobases, 12 to 40 nucleobases, 12 to 35 nucleobases, 12 to 30 nucleobases, 12 to 25 nucleobases, 12 to 20 nucleobases, or 12 to 15 nucleobases. Described herein, in some aspects, is a composition of a nucleic acid molecule that encodes for the NSAE-modulating agent. In some embodiments, the nucleic acid molecule is incorporated into a viral delivery system. In some embodiments, the viral delivery system is an adenovirus-associated vector.

[0129] In some aspects, provided herein is a method of modulating protein expression, comprising: (a) contacting a non-sense mediated RNA decay alternative exon (NSAE)-modulating agent to a target motif within a pre-processed mRNA transcript, wherein the NSAE comprises (i) only a portion of a canonical exon, or (ii) a canonical exon and at least a portion of an intron adjacent to the canonical exon; (b) processing a mRNA transcript from the pre-processed mRNA transcript thereby forming a processed mRNA transcript, wherein the NSAE-modulating agent modulates exclusion of an NSAE from the processed mRNA transcript and modulates inclusion of the canonical exon in the processed mRNA transcript; and (c) translating the processed mRNA transcript wherein the exclusion of the NSAE and inclusion of the canonical exon modulates protein expression relative to the protein expression of an equivalent mRNA transcript comprising the NSAE instead of the canonical exon. In some embodiments, the target motif is located in an intronic region between two canonical exons. In some embodiments, the target motif is located in one of the two canonical exons. In some embodiments, the target motif is located in a region spanning both an intron and a canonical exon.

[0130] In some aspects, provided herein is a method of modulating expression of a target protein by a cell having a pre-processed mRNA transcript (pre-mRNA) that encodes the target protein and comprises: an alternative nonsense mediated RNA decay-inducing (NMD) exon comprising an alternative 5′ splice site downstream of the 5′ splice site of a canonical exon and within the canonical exon, or upstream of the 5′ splice site of the canonical exon and within an intron, the method comprising contacting a non-sense mediated RNA decay alternative exon (NSAE)-modulating agent to the cell, wherein the non-sense mediated RNA decay alternative exon (NSAE)-modulating agent modulates processing of an mRNA transcript from the pre-processed mRNA transcript by modulating splicing of the pre-mRNA at the 5′ alternative splice site, and wherein the splicing of the pre-mRNA at the 5′ alternative splice site modulates the expression of the target protein.

[0131] In some embodiments, the non-sense mediated RNA decay alternative exon (NSAE)-modulating agent binds to a targeted portion of the pre-processed mRNA transcript. In some embodiments, the wherein the non-sense mediated RNA decay alternative exon (NSAE)-modulating agent binds to a factor involved in splicing of the NSAE or NMD exon. In some embodiments, the wherein the non-sense mediated RNA decay alternative exon (NSAE)-modulating agent inhibits activity of a factor involved in splicing of the NMD exon. In some embodiments, the wherein the non-sense mediated RNA decay alternative exon (NSAE)-modulating agent interferes with binding of a factor involved in splicing of the NMD exon to a region of the targeted portion of the pre-processed mRNA transcript. In some embodiments, modulation of splicing of the pre-mRNA increases the expression of the target protein. In some embodiments, the level the target protein in the cell is increased about 1.1 to about 10-fold, about 1.5 to about 10-fold, about 2 to about 10-fold, about 3 to about 10-fold, about 4 to about 10-fold, about 1.1 to about 5-fold, about 1.1 to about 6-fold, about 1.1 to about 7-fold, about 1.1 to about 8-fold, about 1.1 to about 9-fold, about 2 to about 5-fold, about 2 to about 6-fold, about 2 to about 7-fold, about 2 to about 8-fold, about 2 to about 9-fold, about 3 to about 6-fold, about 3 to about 7-fold, about 3 to about 8-fold, about 3 to about 9-fold, about 4 to about 7-fold, about 4 to about 8-fold, about 4 to about 9-fold, at least about 1.1-fold, at least about 1.5-fold, at least about 2-fold, at least about 2.5-fold, at least about 3-fold, at least about 3.5-fold, at least about 4-fold, at least about 5-fold, or at least about 10-fold, compared to the level of processed mRNA encoding the target protein in a control cell. In some embodiments, modulation of splicing of the pre-mRNA increases production of the processed mRNA encoding the target protein. In some embodiments, the level of processed mRNA encoding the target protein in the cell contacted with the therapeutic agent is increased about 1.1 to about 10-fold, about 1.5 to about 10-fold, about 2 to about 10-fold, about 3 to about 10-fold, about 4 to about 10-fold, about 1.1 to about 5-fold, about 1.1 to about 6-fold, about 1.1 to about 7-fold, about 1.1 to about 8-fold, about 1.1 to about 9-fold, about 2 to about 5-fold, about 2 to about 6-fold, about 2 to about 7-fold, about 2 to about 8-fold, about 2 to about 9-fold, about 3 to about 6-fold, about 3 to about 7-fold, about 3 to about 8-fold, about 3 to about 9-fold, about 4 to about 7-fold, about 4 to about 8-fold, about 4 to about 9-fold, at least about 1.1-fold, at least about 1.5-fold, at least about 2-fold, at least about 2.5-fold, at least about 3-fold, at least about 3.5-fold, at least about 4-fold, at least about 5-fold, or at least about 10-fold, compared to the level of processed mRNA encoding the target protein in a control cell. In some embodiments, the target protein is the canonical isoform of the protein. In some embodiments, the target protein is SynGAP1. In some embodiments, the non-sense mediated RNA decay alternative exon (NSAE)-modulating agent is a composition described herein.

[0132] In some aspects, provided herein is a pharmaceutical composition comprising: a therapeutic agent comprising a composition described herein; and a pharmaceutically acceptable excipient and/or a delivery vehicle.

[0133] In some aspects, provided herein is a method of treating or preventing a disease or condition in a subject in need thereof, the method comprising: administering to the subject a pharmaceutical composition described herein.

[0134] In some aspects, provided herein is a method of treating or preventing a disease or condition in a subject in need thereof, the method comprising: administering to the subject a pharmaceutical composition comprising: (a) a non-sense mediated RNA decay alternative exon (NSAE)-modulating agent that interacts with a target motif within a pre-processed mRNA transcript to modulate exclusion of an NSAE from a processed mRNA transcript and to modulate inclusion of a canonical exon in the processed mRNA transcript, wherein the NSAE comprises (i) only a portion of a canonical exon, or (ii) a canonical exon and at least a portion of an intron adjacent to the canonical exon; and (b) a pharmaceutically acceptable excipient and/or a delivery vehicle, wherein the disease or condition is treated or prevented in the subject by the administration of the NSAE-modulating agent by a modulation in expression of a protein translated from the processed mRNA transcript.

[0135] In some aspects, provided herein is a method of treating a disease or condition in a subject in need thereof by modulating expression of a target protein in a cell of the subject, wherein the cell of the subject has a pre-processed mRNA transcript (pre-mRNA) that encodes the target protein and comprises: (a) an exon preceded by an intron flanking a 5′ splice site of the exon; and (b) an alternative nonsense mediated RNA decay-inducing (NMD) exon comprising an alternative 5′ splice site downstream of the 5′ splice site of the exon and within the exon, or upstream of the 5′ splice site of the exon and within the intron, the method comprising contacting a therapeutic agent to the cell, wherein the therapeutic agent modulates processing of an mRNA transcript from the pre-processed mRNA transcript by modulating splicing of the pre-mRNA at the 5′ alternative splice site, and wherein the splicing of the pre-mRNA at the 5′ alternative splice site modulates the expression of the target protein in the cell of the subject.

[0136] In some embodiments the disease is autosomal dominant mental retardation, epileptic encephalopathy, or autism. In some embodiments, the disease or the condition is caused by a deficient amount or activity of the target protein. In some embodiments, the therapeutic agent increases the level of the processed mRNA encoding the target protein in the cell. In some embodiments, the therapeutic agent increases the expression of the target protein in the cell. In some embodiments, the level of processed mRNA encoding the target protein in the cell contacted with the therapeutic agent is increased about 1.1 to about 10-fold, about 1.5 to about 10-fold, about 2 to about 10-fold, about 3 to about 10-fold, about 4 to about 10-fold, about 1.1 to about 5-fold, about 1.1 to about 6-fold, about 1.1 to about 7-fold, about 1.1 to about 8-fold, about 1.1 to about 9-fold, about 2 to about 5-fold, about 2 to about 6-fold, about 2 to about 7-fold, about 2 to about 8-fold, about 2 to about 9-fold, about 3 to about 6-fold, about 3 to about 7-fold, about 3 to about 8-fold, about 3 to about 9-fold, about 4 to about 7-fold, about 4 to about 8-fold, about 4 to about 9-fold, at least about 1.1-fold, at least about 1.5-fold, at least about 2-fold, at least about 2.5-fold, at least about 3-fold, at least about 3.5-fold, at least about 4-fold, at least about 5-fold, or at least about 10-fold, compared to the level of processed mRNA encoding the target protein in a control cell. In some embodiments, the level the target protein in the cell is increased about 1.1 to about 10-fold, about 1.5 to about 10-fold, about 2 to about 10-fold, about 3 to about 10-fold, about 4 to about 10-fold, about 1.1 to about 5-fold, about 1.1 to about 6-fold, about 1.1 to about 7-fold, about 1.1 to about 8-fold, about 1.1 to about 9-fold, about 2 to about 5-fold, about 2 to about 6-fold, about 2 to about 7-fold, about 2 to about 8-fold, about 2 to about 9-fold, about 3 to about 6-fold, about 3 to about 7-fold, about 3 to about 8-fold, about 3 to about 9-fold, about 4 to about 7-fold, about 4 to about 8-fold, about 4 to about 9-fold, at least about 1.1-fold, at least about 1.5-fold, at least about 2-fold, at least about 2.5-fold, at least about 3-fold, at least about 3.5-fold, at least about 4-fold, at least about 5-fold, or at least about 10-fold, compared to the level of processed mRNA encoding the target protein in a control cell. In some embodiments, the method further comprises assessing mRNA levels or expression levels of the target protein. In some embodiments, the method further comprises assessing the subject's genome for at least one genetic mutation associated with the disease.

[0137] In some embodiments, the disease or the condition is caused by an excess amount or activity of the target protein. In some embodiments, the therapeutic agent decreases the level of the processed mRNA encoding the target protein in the cell. In some embodiments, the therapeutic agent decreases the expression of the target protein in the cell. In some embodiments, the level of processed mRNA encoding the target protein in the cell contacted with the therapeutic agent is decreased about 1.1 to about 10-fold, about 1.5 to about 10-fold, about 2 to about 10-fold, about 3 to about 10-fold, about 4 to about 10-fold, about 1.1 to about 5-fold, about 1.1 to about 6-fold, about 1.1 to about 7-fold, about 1.1 to about 8-fold, about 1.1 to about 9-fold, about 2 to about 5-fold, about 2 to about 6-fold, about 2 to about 7-fold, about 2 to about 8-fold, about 2 to about 9-fold, about 3 to about 6-fold, about 3 to about 7-fold, about 3 to about 8-fold, about 3 to about 9-fold, about 4 to about 7-fold, about 4 to about 8-fold, about 4 to about 9-fold, at least about 1.1-fold, at least about 1.5-fold, at least about 2-fold, at least about 2.5-fold, at least about 3-fold, at least about 3.5-fold, at least about 4-fold, at least about 5-fold, or at least about 10-fold, compared to the level of processed mRNA encoding the target protein in a control cell. In some embodiments, the level the target protein in the cell is decreased about 1.1 to about 10-fold, about 1.5 to about 10-fold, about 2 to about 10-fold, about 3 to about 10-fold, about 4 to about 10-fold, about 1.1 to about 5-fold, about 1.1 to about 6-fold, about 1.1 to about 7-fold, about 1.1 to about 8-fold, about 1.1 to about 9-fold, about 2 to about 5-fold, about 2 to about 6-fold, about 2 to about 7-fold, about 2 to about 8-fold, about 2 to about 9-fold, about 3 to about 6-fold, about 3 to about 7-fold, about 3 to about 8-fold, about 3 to about 9-fold, about 4 to about 7-fold, about 4 to about 8-fold, about 4 to about 9-fold, at least about 1.1-fold, at least about 1.5-fold, at least about 2-fold, at least about 2.5-fold, at least about 3-fold, at least about 3.5-fold, at least about 4-fold, at least about 5-fold, or at least about 10-fold, compared to the level of processed mRNA encoding the target protein in a control cell.

[0138] In some embodiments, at least one genetic mutation is within a locus of a gene associated with the disease. In some embodiments, at least one genetic mutation is within a locus associated with expression of a gene associated with the disease. In some embodiments, at least one genetic mutation is within the SYNGAP1 gene locus. In some embodiments, at least one genetic mutation is within a locus associated with SYNGAP1 gene expression. In some embodiments, at least one genetic mutation is within a target gene locus, wherein the target gene locus is a SYNGAP1 gene. In some embodiments, the subject is a human. In some embodiments, the subject is a non-human animal. In some embodiments, the subject is a fetus, an embryo, or a child. In some embodiments, the cell or the cells is ex vivo, or in a tissue, or organ ex vivo. In some embodiments, the therapeutic agent is administered to the subject by intracerebroventricular injection, intraperitoneal injection, intramuscular injection, intrathecal injection, subcutaneous injection, oral administration, synovial injection, intravitreal administration, subretinal injection, topical application, implantation, or intravenous injection.

[0139] In some aspects, provided herein is a therapeutic agent for use in a method described herein.

[0140] In some aspects, provided herein is a pharmaceutical composition comprising a therapeutic agent described herein and a pharmaceutically acceptable excipient.

[0141] In some aspects, provided herein is a method of treating a subject in need thereof, comprising administering a pharmaceutical composition described herein by intracerebroventricular injection, intraperitoneal injection, intramuscular injection, intrathecal injection, subcutaneous injection, oral administration, synovial injection, intravitreal administration, subretinal injection, topical application, implantation, or intravenous injection to the subject.

### BRIEF DESCRIPTION OF THE DRAWINGS

[0142] FIG. 1 depicts exemplary TaqMan qPCR results using RNA from HEK293 cells transfected for 24 hrs with 80 nM of the indicated ASOs. The exemplary TaqMan probe spans exons 10 and 11 junction and measures productive mRNA.

[0143] FIG. 2 depicts TaqMan qPCR results for productive mRNA and RT-PCR results for nonproductive mRNA using RNA from HEK293 cells transfected for 24 hrs with 80 nM of the indicated ASOs. The exemplary TaqMan probe spans exons 10 and 11 junction and measures productive mRNA.

[0144] FIG. 3 depicts TaqMan qPCR results for productive mRNA and RT-PCR results for nonproductive mRNA using RNA from HEK293 cells transfected for 24 hrs with 80 nM of the indicated ASOs. The exemplary TaqMan probe spans exons 10 and 11 junction and measures productive mRNA.

[0145] FIG. 4 depicts RT-PCR results for nonproductive mRNA using RNA from HEK293 cells transfected for 24 hrs with 80 nM of the indicated ASOs.

[0146] FIG. 5 depicts RT-PCR results for nonproductive mRNA using RNA from HEK293 cells. Cells were transfected for 24 hrs with 80 nM of the indicated ASOs (left) or treated with 20 μM of the indicated ASOs and allowed to freely uptake the ASOs in 2D culture for 72 hours.

[0147] FIGS. 6A-6H depict RT-PCR results for dose response decrease of nonproductive mRNA using RNA from HEK293 cells. Cells were treated with increasing concentrations of the indicated ASOs and allowed to freely uptake the ASOs in 3D culture for 72 hours. Data for ASO 59 can be found in FIG. 6A; ASO 59-1 in FIG. 6B; ASO 59-2 in FIG. 6C; ASO 59-3 in 6D; ASO 59-4 in FIG. 6E; ASO 59-5 in FIG. 6F; ASO 59-6 in FIG. 6G; and ASO 59-7 in FIG. 6H. The abundance of the Exon18X containing transcripts was plotted against the logarithmic value (log 10) of the ASO dose using a nonlinear regression fit of a variable slope four parameter dose-response curve as calculated by GraphPad Prism 8. Biological replicates were plotted for each concentration with standard deviation (S.D.) indicated. The values of the control group comprising no ASO were used to plot the upper end of the curve at a concentration representative of 0 μM. Some of the projected curve analysis used constrain between 0 and 0.05. The EC50 and log EC50 values were calculated by GraphPad Prism 8.

[0148] FIG. 7 depicts RT-PCR results for nonproductive mRNA using RNA extracted from HEK293 cells 24 hrs after transfection with 80 nM of the indicated ASOs (upper panel), or RNA extracted from HEK293 cells 72 hours after the cells were allowed to freely uptake 20 μM of the indicated ASOs in 3D culture (lower panel).

[0149] FIG. 8 depicts RT-PCR results for dose-responsive decrease of nonproductive mRNA using RNA from HEK293 cells. Cells were treated with increasing concentrations of the indicated ASOs and evaluated 72 hours after they were allowed to freely uptake the ASOs in 3D culture. The abundance of the Exon18X containing transcripts was plotted against the logarithmic value (log 10) of the ASO dose using a nonlinear regression fit of a variable slope four parameter dose-response curve as calculated by GraphPad Prism 8. Biological replicates were plotted for each concentration with standard deviation (S.D.) indicated. The values of the control group comprising no ASO were used to plot the upper end of the curve at a concentration representative of 0 μM. Some of the projected curve analyses used constraints between 0 and 0.05. The EC50 and log EC50 values were calculated by GraphPad Prism 8.

[0150] FIG. 9 depicts RT-PCR results for nonproductive mRNA and results using a ProteinSimple Jess assay to detect the a1 isoform of SYNGAP1. 20 mg of indicated ASO was intracerebroventricular injected (ICV) into P2 Syngap1 heterozygous mice. 4 weeks later, brains were dissected, and hippocampi were assayed for Exon 18X inclusion by RT-PCR. The levels of the a1-isoform of SYNGAP1 protein were normalized to total protein via a ProteinSimple JESS assay.

[0151] FIGS. 10A-10B are histograms illustrating the fold change in ASO compound target engagement (FIG. 10A) and SynGAP alpha 1 protein (FIG. 10B) in the cerebral cortex after intracerebroventricular injection of Syngap1 heterozygous (Syngap1^{+/-}) mouse pups with various amounts (3 μg, 10 μg, 20 μg, and 30 μg) of four different ASO compounds (compounds mm59, mm60, mm61, and mm62). ASO target engagement was evaluated as the fold change in nonproductive mRNA normalized to mitochondrial ribosomal protein L16 (MRPL16) RNA. SynGAP alpha 1 protein levels were normalized to actin.

[0152] FIGS. 11A-11B are histograms illustrating the fold change in ASO compound target engagement (FIG. 11A) and SynGAP alpha 1 protein (FIG. 11B) in the hippocampus after intracerebroventricular injection of Syngap1 heterozygous (Syngap1^{+/-}) mouse pups with various amounts (3 μg, 10 μg, 20 μg, and 30 μg) of four different ASO compounds (compounds mm59, mm60, mm61, and mm62). ASO target engagement was evaluated as the fold change in nonproductive mRNA normalized to mitochondrial ribosomal protein L16 (MRPL16) RNA. SynGAP alpha 1 protein levels were normalized to actin.

[0153] FIGS. 12A-12B are histograms illustrating the fold change in ASO compound target engagement (FIG. 12A) and SynGAP alpha 1 protein (FIG. 12B) in the midbrain after intracerebroventricular injection of Syngap1 heterozygous (Syngap1^{+/-}) mouse pups with various amounts (3 μg, 10 μg, 20 μg, and 30 μg) of four different ASO compounds (compounds mm59, mm60, mm61, and mm62). ASO target engagement was evaluated as the fold change in nonproductive mRNA normalized to mitochondrial ribosomal protein L16 (MRPL16) RNA. SynGAP alpha 1 protein levels were normalized to actin.

[0154] FIGS. 13A-13B are histograms illustrating the fold change in ASO compound target engagement (FIG. 13A) and SynGAP alpha 1 protein (FIG. 13B) in the basal ganglia/thalamus after intracerebroventricular injection of Syngap1 heterozygous (Syngap1^{+/-}) mouse pups with various amounts (3 μg, 10 μg, 20 μg, and 30 μg) of four different ASO compounds (compounds mm59, mm60, mm61, and mm62). ASO target engagement was evaluated as the fold change in nonproductive mRNA normalized to mitochondrial ribosomal protein L16 (MRPL16) RNA. SynGAP alpha 1 protein levels were normalized to actin.

[0155] FIGS. 14A-14C depict RT-PCR results for dose-responsive decrease of nonproductive mRNA using RNA from mouse cortical neurons (MCNs). Cells were treated with increasing concentrations of the indicated ASOs and allowed to freely uptake the ASOs in 3D culture for 72 hours in three different biological replicates (replicate 1 can be found in FIG. 14A; replicate 2 can be found in FIG. 14B; and replicate 3 can be found in FIG. 14C). The abundance of the Exon18X containing transcripts was plotted against the logarithmic value (log 10) of the ASO dose using a nonlinear regression fit of a variable slope four parameter dose-response curve as calculated by GraphPad Prism 8. Biological replicates were plotted for each concentration with standard deviation (S.D.) indicated. The EC50 and log EC50 values were calculated by GraphPad Prism 8.

### DETAILED DESCRIPTION

[0156] Certain specific details of this description are set forth in order to provide a thorough understanding of various embodiments. However, one skilled in the art will understand that the present disclosure may be practiced without these details. In other instances, well-known structures have not been shown or described in detail to avoid unnecessarily obscuring descriptions of the embodiments. Unless the context requires otherwise, throughout the specification and claims which follow, the word “comprise” and variations thereof, such as, “comprises” and “comprising” are to be construed in an open, inclusive sense, that is, as “including, but not limited to.” Further, headings provided herein are for convenience only and do not interpret the scope or meaning of the claimed disclosure.

[0157] As used in this specification and the appended claims, the singular forms “a,” “an,” and “the” include plural referents unless the content clearly dictates otherwise. It should also be noted that the term “or” is generally employed in its sense including “and/or” unless the content clearly dictates otherwise.

[0158] The coordinate as used herein refers to the coordinate of the genome reference assembly GRCh38 (Genome Research Consortium human build 38), also known as Hg38 (Human genome build 38).

[0159] Unless otherwise defined, all technical and scientific terms used herein have the same meaning as commonly understood by one of ordinary skill in the art to which this disclosure belongs. Although methods and materials similar or equivalent to those described herein can be used in the practice or testing of the present disclosure, suitable methods and materials are described below.

[0160] As used herein, an alternative 3′ splice site of an intron is equivalent to an alternative 5′ splice site of the exon immediately downstream of that intron.

[0161] As used herein, an alternative 5′ splice site of an intron is equivalent to an alternative 3′ splice site of the exon immediately upstream of that intron.

[0162] Unless specific definitions are provided, the nomenclature utilized in connection with, and the procedures and techniques of, analytical chemistry, synthetic organic chemistry, and medicinal and pharmaceutical chemistry described herein are those well-known and commonly used in the art. Standard techniques may be used for chemical synthesis, and chemical analysis.

[0163] Unless otherwise indicated, the following terms have the following meanings:

[0164] “Administering” can mean providing a pharmaceutical agent to an animal, and includes, but is not limited to administering by a medical professional and self-administering. “Amelioration” refers to a lessening, slowing, stopping, or reversing of at least one indicator of the severity of a syndrome or condition. The severity of indicators may be determined by subjective or objective measures, which are known to those skilled in the art.

[0165] “Animal” can refer to a human or non-human animal, including, but not limited to, mice, rats, rabbits, dogs, cats, pigs, and non-human primates, including, but not limited to, monkeys and chimpanzees.

[0166] “Antisense oligomer” can mean an oligomeric compound that is capable of undergoing hybridization to a target nucleic acid through hydrogen bonding. Examples of antisense oligomers include single-stranded and double-stranded compounds, such as, antisense oligonucleotides, siRNAs, shRNAs, and ssRNAs.

[0167] “Antisense inhibition” or “inhibition” can mean reduction of target nucleic acid levels in the presence of an antisense oligomer complementary to a target nucleic acid compared to target nucleic acid levels or in the absence of the antisense oligomer.

[0168] “Antisense mechanisms” can refer to all those mechanisms involving hybridization of a compound with a target nucleic acid, wherein the outcome or effect of the hybridization is either target degradation or target occupancy with concomitant stalling of the cellular machinery involving, for example, transcription or splicing. An antisense oligomer provided herein can be “antisense” to a target nucleic acid, meaning that the antisense oligomer is capable of undergoing hybridization to a target nucleic acid through hydrogen bonding.

[0169] “Antisense oligonucleotide” can mean a single-stranded oligonucleotide having a nucleobase sequence that permits hybridization to a corresponding segment of a target nucleic acid.

[0170] “Base complementarity” can refer to the capacity for the precise base pairing of nucleobases of an antisense oligonucleotide with corresponding nucleobases in a target nucleic acid (i.e., hybridization), and is mediated by Watson-Crick, Hoogsteen or reversed Hoogsteen hydrogen binding between corresponding nucleobases.

[0171] “Bicyclic sugar” can mean a furanose ring modified by the bridging of two atoms. A bicyclic sugar is a modified sugar.

[0172] “Bicyclic nucleoside” (also “BNA”) can mean a nucleoside having a sugar moiety comprising a bridge connecting two carbon atoms of the sugar ring, thereby forming a bicyclic ring system. In certain embodiments, the bridge connects the 4′-carbon and the 2′-carbon of the sugar ring.

[0173] “Cap structure” or “terminal cap moiety” can mean chemical modifications, which have been incorporated at either terminus of an antisense oligomer. “cEt” or “constrained ethyl” can mean a bicyclic nucleoside having a sugar moiety comprising a bridge connecting the 4′-carbon and the 2′-carbon, wherein the bridge has the formula: 4′-CH(CH3)-O-2.

[0174] “Constrained ethyl nucleoside” (also cEt nucleoside) can mean a nucleoside comprising a bicyclic sugar moiety comprising a 4′-CH(CH3)-O-2′ bridge.

[0175] “Chimeric antisense oligomer” can mean an antisense oligomer that has at least two chemically distinct regions, each position having a plurality of subunits.

[0176] “Complementarity” can mean the capacity for pairing between nucleobases of a first nucleic acid and a second nucleic acid.

[0177] “Contiguous nucleobases” can mean nucleobases immediately adjacent to each other.

[0178] “Diluent” can mean an ingredient in a composition that lacks pharmacological activity but is pharmaceutically necessary or desirable. For example, in drugs that are injected, the diluent may be a liquid, e.g., saline solution.

[0179] “Effective amount” in the context of modulating an activity or of treating or preventing a condition can mean the administration of that amount of pharmaceutical agent to an individual in need of such modulation, treatment, or prophylaxis, either in a single dose or as part of a series, that is effective for modulation of that effect, or for treatment or prophylaxis or improvement of that condition. The effective amount may vary among individuals depending on the health and physical condition of the individual to be treated, the taxonomic group of the individuals to be treated, the formulation of the composition, assessment of the individual's medical condition, and other relevant factors.

[0180] “Efficacy” or “potency,” which are used herein interchangeably, can mean the ability to produce a desired effect.

[0181] “Expression” can include all the processes by which a gene's coded information is converted into structures present and operating in a cell. Such structures include, but are not limited to, the products of transcription and translation.

[0182] “Gapmer” can mean a chimeric antisense oligomer in which an internal region having a plurality of nucleosides that support RNase H cleavage is positioned between external regions having one or more nucleosides, wherein the nucleosides comprising the internal region are chemically distinct from the nucleoside or nucleosides comprising the external regions. The internal region can be referred to as a “gap” and the external regions can be referred to as the “wings.”

[0183] “Hybridization” can mean the annealing of complementary nucleic acid molecules. In certain embodiments, complementary nucleic acid molecules include, but are not limited to, an antisense oligomer and a target nucleic acid. In certain embodiments, complementary nucleic acid molecules include, but are not limited to, an antisense oligonucleotide and a nucleic acid target.

[0184] “Individual” can mean a human or non-human animal selected for treatment or therapy.

[0185] “Inhibiting SYNGAP” or “inhibiting SYNGAP” can mean reducing the level or expression of a SYNGAP mRNA and/or SYNGAP protein. In certain embodiments, SYNGAP mRNA and/or SYNGAP protein levels are inhibited in the presence of an antisense oligomer targeting SYNGAP, including an antisense oligonucleotide targeting SYNGAP, as compared to expression of SYNGAP mRNA and/or SYNGAP protein levels in the absence of a SYNGAP antisense oligomer, such as an antisense oligonucleotide.

[0186] “Inhibiting the expression or activity” can refer to a reduction or blockade of the expression or activity and does not necessarily indicate a total elimination of expression or activity.

[0187] “Internucleoside linkage” can refer to the chemical bond between nucleosides.

[0188] “Intra-cisterna magna” or “ICM” injection or delivery can refer to injection of an agent or pharmaceutical composition provided herein in the cerebrospinal fluid (CSF)-filled subarachnoid space between the cerebellum and the dorsal side of the medulla oblongata.

[0189] “Linked nucleosides” can refer to adjacent nucleosides linked together by an internucleoside linkage.

[0190] “SYNGAP antisense oligomer” can mean an antisense oligomer targeting SYNGAP mRNA.

[0191] “Mismatch” or “non-complementary nucleobase” can refer to the case when a nucleobase of a first nucleic acid is not capable of pairing with the corresponding nucleobase of a second or target nucleic acid.

[0192] “Modified internucleoside linkage” can refer to a substitution or any change from a naturally occurring internucleoside bond (i.e., a phosphodiester internucleoside bond).

[0193] “Modified nucleobase” can refer to any nucleobase other than adenine, cytosine, guanine, thymidine, or uracil. An “unmodified nucleobase” means the purine bases adenine (A) and guanine (G), and the pyrimidine bases thymine (T), cytosine (C), and uracil (U).

[0194] “Modified nucleoside” can refer to a nucleoside having, independently, a modified sugar moiety and/or modified nucleobase.

[0195] “Modified nucleotide” can refer to a nucleotide having, independently, a modified sugar moiety, modified internucleoside linkage, and/or modified nucleobase.

[0196] “Modified antisense oligonucleotide” can refer to an oligonucleotide comprising at least one modified internucleoside linkage, modified sugar, and/or modified nucleobase.

[0197] “Modified sugar” can refer to substitution and/or any change from a natural sugar moiety.

[0198] “Monomer” can refer to a single unit of an oligomer. Monomers include, but are not limited to, nucleosides and nucleotides, whether naturally occurring or modified. “Motif means the pattern of unmodified and modified nucleosides in an antisense oligomer.

[0199] “Natural sugar moiety” can refer to a sugar moiety found in DNA (2′-H) or RNA (2′-OH).

[0200] “Naturally occurring internucleoside linkage” can refer to a 3′ to 5′ phosphodiester linkage.

[0201] “Non-complementary nucleobase” can refer to a pair of nucleobases that do not form hydrogen bonds with one another or otherwise support hybridization.

[0202] “Nucleic acid” can refer to molecules composed of monomeric nucleotides. A nucleic acid includes, but is not limited to, ribonucleic acids (RNA), deoxyribonucleic acids (DNA), single-stranded nucleic acids, double-stranded nucleic acids, small interfering ribonucleic acids (siRNA), and microRNAs (miRNA).

[0203] “Nucleobase” can mean a heterocyclic moiety capable of pairing with a base of another nucleic acid. “Nucleobase complementarity” can refer to a nucleobase that is capable of base pairing with another nucleobase. For example, in DNA, adenine (A) is complementary to thymine (T). For example, in RNA, adenine (A) is complementary to uracil (U). In certain embodiments, complementary nucleobase refers to a nucleobase of an antisense oligomer that is capable of base pairing with a nucleobase of its target nucleic acid. For example, if a nucleobase at a certain position of an antisense oligomer is capable of hydrogen bonding with a nucleobase at a certain position of a target nucleic acid, then the position of hydrogen bonding between the oligonucleotide and the target nucleic acid is considered to be complementary at that nucleobase pair.

[0204] “Nucleobase sequence” can refer to the order of contiguous nucleobases independent of any sugar, linkage, and/or nucleobase modification.

[0205] “Nucleoside” can refer to a nucleobase linked to a sugar.

[0206] “Nucleoside mimetic” can include those structures used to replace the sugar or the sugar and the base and not necessarily the linkage at one or more positions of an oligomeric compound such as for example nucleoside mimetics having morpholino, cyclohexenyl, cyclohexyl, tetrahydropyranyl, bicyclo, or tricyclo sugar mimetics, e.g., non furanose sugar units. Nucleotide mimetic includes those structures used to replace the nucleoside and the linkage at one or more positions of an oligomeric compound such as for example peptide nucleic acids or morpholinos (morpholinos linked by —N(H)—C(═O)—O— or other non-phosphodiester linkage). Sugar surrogate overlaps with the slightly broader term nucleoside mimetic but is intended to indicate replacement of the sugar unit (furanose ring) only. The tetrahydropyranyl rings provided herein are illustrative of an example of a sugar surrogate wherein the furanose sugar group has been replaced with a tetrahydropyranyl ring system. “Mimetic” can refer to groups that are substituted for a sugar, a nucleobase, and/or internucleoside linkage. Generally, a mimetic can be used in place of the sugar or sugar-internucleoside linkage combination, and the nucleobase is maintained for hybridization to a selected target.

[0207] “Nucleotide” can refer to a nucleoside having a phosphate group covalently linked to the sugar portion of the nucleoside.

[0208] “Oligomeric compound” or “oligomer,” which are used herein interchangeably, can refer to a polymer of linked monomeric subunits which is capable of hybridizing to at least a region of a nucleic acid molecule.

[0209] “Oligonucleotide” can refer to a polymer of linked nucleosides each of which can be modified or unmodified, independent one from another.

[0210] “Parenteral administration” can refer to administration through injection (e.g., bolus injection) or infusion. Parenteral administration can include subcutaneous administration, intravenous administration, intramuscular administration, intraarterial administration, intraperitoneal administration, or intracranial administration, e.g., intrathecal, intracerebroventricular, or intra cisterna magna administration.

[0211] “Peptide” can refer to a molecule formed by linking at least two amino acids by amide bonds. Without limitation, as used herein, peptide refers to polypeptides and proteins.

[0212] “Pharmaceutical agent” can refer to a substance that provides a therapeutic benefit when administered to an individual. For example, in certain embodiments, an antisense oligonucleotide targeted to SYNGAP is a pharmaceutical agent.

[0213] “Pharmaceutical composition” can refer to a mixture of substances suitable for administering to an individual. For example, a pharmaceutical composition can comprise an antisense oligonucleotide and a sterile aqueous solution.

[0214] “Pharmaceutically acceptable salts” can refer to physiologically and pharmaceutically acceptable salts of a pharmaceutically active ingredient (e.g., an antisense oligomer provided herein), such as salts that retain the desired biological activity of the active ingredient and do not impart undesired toxicological effects thereto.

[0215] “Phosphorothioate linkage” can mean a linkage between nucleosides where the phosphodiester bond is modified by replacing one of the non-bridging oxygen atoms with a sulfur atom. A phosphorothioate linkage is a modified internucleoside linkage.

[0216] “Portion” can mean a defined number of contiguous (i.e., linked) nucleobases of a nucleic acid. In certain embodiments, a portion is a defined number of contiguous nucleobases of a target nucleic acid. In certain embodiments, a portion is a defined number of contiguous nucleobases of an antisense oligomer.

[0217] “Prevent” or “preventing” can mean delaying or forestalling the onset or development of a disorder or syndrome for a period of time from minutes to days, weeks to months, or indefinitely.

[0218] “Prophylactically effective amount” can mean an amount of a pharmaceutical agent that provides a prophylactic or preventative benefit to an animal.

[0219] “Ribonucleotide” can mean a nucleotide having a hydroxy at the 2′ position of the sugar portion of the nucleotide. Ribonucleotides may be modified with any of a variety of substituents.

[0220] “Segments” are defined as smaller or sub-portions of regions within a target nucleic acid.

[0221] “Targeting” or “targeted” can mean the process of design and selection of an antisense oligomer that will specifically hybridize to a target nucleic acid and induce a desired effect.

[0222] “Target nucleic acid,” “target RNA,” and “target RNA transcript” and “nucleic acid target” all can mean a nucleic acid capable of being targeted by antisense oligomers. In certain embodiments, the target nucleic acid is a UBE2A nucleic acid.

[0223] “Target region” can mean a portion of a target nucleic acid to which one or more antisense oligomers is targeted.

[0224] “Target segment” can mean the sequence of nucleotides of a target nucleic acid to which an antisense oligomer is targeted. “5′ target site” refers to the 5′-most nucleotide of a target segment. “3′ target site” refers to the 3′-most nucleotide of a target segment.

[0225] “Therapeutically effective amount” can mean an amount of a pharmaceutical agent that provides a therapeutic benefit to an individual. “Treat” or “treating” or “treatment” can refer to administering a composition to effect an alteration or improvement of the disorder or syndrome.

[0226] “Unmodified nucleobases” can mean the purine bases adenine (A) and guanine (G), and the pyrimidine bases thymine (T), cytosine (C) and uracil (U).

[0227] “Unmodified nucleotide” can mean a nucleotide composed of naturally occurring nucleobases, sugar moieties, and internucleoside linkages. In certain embodiments, an unmodified nucleotide is an RNA nucleotide (i.e., β-D-ribonucleosides) or a DNA nucleotide (i.e., β-D-deoxyribonucleoside).

[0228] “Wing segment” can mean a plurality of nucleosides modified to impart to an oligonucleotide properties such as enhanced inhibitory activity, increased binding affinity for a target nucleic acid, or resistance to degradation by in vivo nucleases.

[0229] In certain embodiments, an antisense oligomer targeted to a target nucleic acid is 12 to 30 subunits in length. In certain embodiments, an antisense oligomer targeted to a target nucleic acid is 12 to 25 subunits in length. In certain embodiments, an antisense oligomer targeted to a target nucleic acid is 12 to 22 subunits in length. In certain embodiments, an antisense oligomer targeted to a target nucleic acid is 14 to 20 subunits in length. In certain embodiments, an antisense oligomer targeted to a target nucleic acid is 15 to 25 subunits in length. In certain embodiments, an antisense oligomer targeted to a target nucleic acid is 18 to 22 subunits in length. In certain embodiments, an antisense oligomer targeted to a target nucleic acid is 19 to 21 subunits in length. In certain embodiments, the antisense oligomer is 8 to 80, 12 to 50, 13 to 30, 13 to 50, 14 to 30, 14 to 50, 15 to 30, 15 to 50, 16 to 30, 16 to 50, 17 to 30, 17 to 50, 18 to 30, 18 to 50, 19 to 30, 19 to 50, or 20 to 30 linked subunits in length.

[0230] In certain embodiments, an antisense oligomer targeted to a target nucleic acid is 12 subunits in length. In certain embodiments, an antisense oligomer targeted to a target nucleic acid is 13 subunits in length. In certain embodiments, an antisense oligomer targeted to a target nucleic acid is 14 subunits in length. In certain embodiments, an antisense oligomer targeted to a target nucleic acid is 15 subunits in length. In certain embodiments, an antisense oligomer targeted to a target nucleic acid is 16 subunits in length. In certain embodiments, an antisense oligomer targeted to a target nucleic acid is 17 subunits in length. In certain embodiments, an antisense oligomer targeted to a target nucleic acid is 18 subunits in length. In certain embodiments, an antisense oligomer targeted to a target nucleic acid is 19 subunits in length. In certain embodiments, an antisense oligomer targeted to a target nucleic acid is 20 subunits in length. In certain embodiments, an antisense oligomer targeted to a target nucleic acid is 21 subunits in length. In certain embodiments, an antisense oligomer targeted to a target nucleic acid is 22 subunits in length. In certain embodiments, an antisense oligomer targeted to a target nucleic acid is 23 subunits in length. In certain embodiments, an antisense oligomer targeted to a target nucleic acid is 24 subunits in length. In certain embodiments, an antisense oligomer targeted to a target nucleic acid is 25 subunits in length. In certain embodiments, an antisense oligomer targeted to a target nucleic acid is 26 subunits in length. In certain embodiments, an antisense oligomer targeted to a target nucleic acid is 27 subunits in length. In certain embodiments, an antisense oligomer targeted to a target nucleic acid is 28 subunits in length. In certain embodiments, an antisense oligomer targeted to a target nucleic acid is 29 subunits in length. In certain embodiments, an antisense oligomer targeted to a target nucleic acid is 30 subunits in length. In certain embodiments, the antisense oligomer targeted to a target nucleic acid is 31, 32, 33, 34, 35, 36, 37, 38, 39, 40, 41, 42, 43, 44, 45, 46, 47, 48, 49, 50, 51, 52, 53, 54, 55, 56, 57, 58, 59, 60, 61, 62, 63, 64, 65, 66, 67, 68, 69, 70, 71, 72, 73, 74, 75, 76, 77, 78, 79, or 80 linked subunits in length, or a range defined by any two of the above values. In certain embodiments the antisense oligomer is an antisense oligonucleotide, and the linked subunits are nucleosides.

[0231] Antisense oligomers provided herein can have nucleotides that mismatch the target sequence. For instance, an antisense oligonucleotide of 25 nucleobases in length can have 8 or 11 mismatch bases near the ends of the antisense oligonucleotides, while still being able to direct specific cleavage of the target mRNA, albeit to a lesser extent than the antisense oligonucleotides that contained no mismatches. In some cases, the antisense oligonucleotide provided herein has 12 to 30 subunits in length (e.g., nucleobases), including those with 1 or 3 mismatches.

### Chemically Modified Antisense Oligomer

[0232] In certain embodiments, antisense oligomers provided herein have chemically modified subunits arranged in patterns, or motifs, to confer to the antisense oligomers properties such as enhanced inhibitory activity, increased binding affinity for a target nucleic acid, or resistance to degradation by in vivo nucleases.

[0233] In some cases, provided herein are chimeric antisense oligomers. For instance, chimeric antisense oligomers can contain at least one region modified so as to confer increased resistance to nuclease degradation, increased cellular uptake, increased binding affinity for the target nucleic acid, and/or increased inhibitory activity. A second region of a chimeric antisense oligomer can optionally serve as a substrate for the cellular endonuclease RNase H, which cleaves the RNA strand of an RNA:DNA duplex.

[0234] In some cases, the antisense oligomers provided herein have a gapmer motif. Antisense oligomers having a gapmer motif can be considered chimeric antisense oligomers. In a gapmer an internal region having a plurality of nucleotides that supports RNaseH cleavage can be positioned between external regions having a plurality of nucleotides that are chemically distinct from the nucleosides of the internal region. In the case of an antisense oligonucleotide having a gapmer motif, the gap segment can serve as the substrate for endonuclease cleavage, while the wing segments comprise modified nucleosides. In certain embodiments, the regions of a gapmer are differentiated by the types of sugar moieties comprising each distinct region. The types of sugar moieties that are used to differentiate the regions of a gapmer can include β-D-ribonucleosides, β-D-deoxyribonucleosides, 2′-modified nucleosides (such 2′-modified nucleosides may include 2′-MOE, and 2′-O—CH₃, among others), and bicyclic sugar modified nucleosides (such bicyclic sugar modified nucleosides may include those having a 4′-(CH₂)n-O-2′ bridge, where n=1 or n=2 and 4′-CH₂—O—CH₂-2′). In certain embodiments, wings include several modified sugar moieties, including, for example 2′-MOE. In certain embodiments, wings include several modified and unmodified sugar moieties. In certain embodiments, wings include various combinations of 2′-MOE nucleosides and 2′-deoxynucleosides.

[0235] Each distinct region can comprise uniform sugar moieties, variant, or alternating sugar moieties. The wing-gap-wing motif is frequently described as “X—Y—Z”, where “X” represents the length of the 5′ wing, “Y” represents the length of the gap, and “Z” represents the length of the 3′ wing. “X” and “Z” can comprise uniform, variant, or alternating sugar moieties. In certain embodiments, “X” and “Y” include one or more 2′-deoxynucleosides. “Y” can comprise 2′-deoxynucleosides. As used herein, a gapmer described as “X—Y—Z” can have a configuration such that the gap is positioned immediately adjacent to each of the 5′ wing and the 3′ wing. Thus, no intervening nucleotides can exist between the 5′ wing and gap, or the gap and the 3′ wing. Any of the antisense oligomers described herein can have a gapmer motif. In certain embodiments, “X” and “Z” are the same; in other cases, they are different.

[0236] In certain cases, gapmers provided herein include, for example 20-mers having a motif of 5-10-5 in the form of “X—Y—Z” as described herein. In certain embodiments, gapmers provided herein include, for example 19-mers having a motif of 5-9-5 in the form of “X—Y—Z” as described herein. In certain embodiments, gapmers provided herein include, for example 18-mers having a motif of 5-8-5 in the form of “X—Y—Z” as described herein. In certain embodiments, gapmers provided herein include, for example 18-mers having a motif of 4-8-6 in the form of “X—Y—Z” as described herein. In certain embodiments, gapmers provided herein include, for example 18-mers having a motif of 6-8-4 in the form of “X—Y—Z” as described herein. In certain embodiments, gapmers provided herein include, for example 18-mers having a motif of 5-7-6 in the form of “X—Y—Z” as described herein.

[0237] In some cases, the antisense oligomer comprises: a 5′ region consisting of three, four, five, or six linked nucleosides (e.g., “X” part discussed above); a central region consisting of eight, nine, ten, eleven, or twelve linked nucleosides (e.g., “Y” part discussed above); and a 3′ region consisting of three, four, five, or six linked nucleosides (e.g., “Z” part discussed above). In some cases, each of the three, four, five, or six linked nucleosides in the 5′ region and each of three, four, five, or six linked nucleosides in the 3′ region comprise a modified sugar moiety, and each of the eight, nine, ten, eleven, or twelve linked nucleosides in the central region is a deoxyribonucleoside. In some cases, the modified sugar moiety includes a 2′-O-methyl moiety, a 2′-Fluoro moiety, a 2′-O-methoxyethyl moiety, 2′-NMA moiety, or any combination thereof. In some cases, one or more the nucleosides in the 5′ region and in the 3′ region further comprise other modification as disclosed herein. In some cases, all the nucleosides in the 5′ region and in the 3′ region further comprise other modification as disclosed herein.

### Complementarity

[0238] An agent provided herein can have a polynucleotide sequence complementary to a target nucleic acid when a sufficient number of nucleobases in the polynucleotide sequence (for instance antisense oligomer) can hydrogen bond with the corresponding nucleobases of the target nucleic acid, such that a desired effect can occur (e.g., antisense inhibition of a target nucleic acid, such as a SYNGAP nucleic acid).

[0239] Non-complementary nucleobases between an agent (e.g., an antisense oligomer) and a target nucleic acid may be tolerated provided that the agent (e.g., antisense oligomer) remains able to specifically hybridize to a target nucleic acid. Moreover, an agent (e.g., antisense oligomer) can hybridize to one or more segments of a target nucleic acid such that intervening or adjacent segments are not involved in the hybridization event (e.g., a loop structure, mismatch, or hairpin structure).

[0240] In certain embodiments, the agents (e.g., antisense oligomers) provided herein, or a specified portion thereof, are, or are at least, 70%, 80%, 85%, 86%, 87%, 88%, 89%, 90%, 91%, 92%, 93%, 94%, 95%, 96%, 97%, 98%, 99%, or 100% complementary to a SYNGAP nucleic acid, a target region, target segment, or specified portion thereof. Percent complementarity of an antisense oligomer with a target nucleic acid can be determined using routine methods, such as using BLAST programs (basic local alignment search tools) and PowerBLAST programs known in the art (Altschul et al., J. Mol. Biol., 1990, 215, 403 410; Zhang and Madden, Genome Res., 1997, 7, 649 656). Percent homology, sequence identity or complementarity, can be determined by, for example, the Gap program (Wisconsin Sequence Analysis Package, Version 8 for Unix, Genetics Computer Group, University Research Park, Madison Wis.), using default settings, which uses the algorithm of Smith and Waterman (Adv. Appl. Math., 1981, 2, 482 489).

[0241] In certain embodiments, the agents (e.g., antisense oligomers) provided herein, or specified portions thereof, are fully complementary (i.e., 100% complementary) to a target nucleic acid, or specified portion thereof. For example, agents (e.g., antisense oligomers) provided herein can be fully complementary to a SYNGAP nucleic acid, or a target region, or a target segment or target sequence thereof. As used herein, “fully complementary” can mean that each nucleobase of an antisense oligomer is capable of precise base pairing with the corresponding nucleobases of a target nucleic acid.

[0242] The location of a non-complementary nucleobase can be at the 5′ end or 3′ end of the antisense oligomer. Alternatively, the non-complementary nucleobase or nucleobases can be at an internal position of the antisense oligomer. When two or more non-complementary nucleobases are present, they can be contiguous (i.e., linked) or non-contiguous. In one embodiment, a non-complementary nucleobase is located in the wing segment of a gapmer antisense oligonucleotide.

[0243] In certain embodiments, antisense oligomers provided herein that are, or are up to 1 1, 12, 13, 14, 15, 16, 17, 18, 19, or 20 nucleobases in length comprise no more than 4, no more than 3, no more than 2, or no more than 1 non-complementary nucleobase(s) relative to a target nucleic acid, or specified portion thereof.

[0244] In certain embodiments, antisense oligomers provided herein that are, or are up to 1 1, 12, 13, 14, 15, 16, 17, 18, 19, 20, 21, 22, 23, 24, 25, 26, 27, 28, 29, or 30 nucleobases in length comprise no more than 6, no more than 5, no more than 4, no more than 3, no more than 2, or no more than 1 non-complementary nucleobase(s) relative to a target nucleic acid, or specified portion thereof.

[0245] The agents (e.g., antisense oligomers) provided herein can also include those which are complementary to a portion of a target nucleic acid. As used herein, “portion” can refer to a defined number of contiguous (i.e., linked) nucleobases within a region or segment of a target nucleic acid. A “portion” can also refer to a defined number of contiguous nucleobases of an antisense oligomer. In certain embodiments, the agents (e.g., antisense oligomers) are complementary to at least an 8-nucleobase portion of a target segment. In certain embodiments, the agents (e.g., antisense oligomers) are complementary to at least a 9-nucleobase portion of a target segment. In certain embodiments, the agents (e.g., antisense oligomers) are complementary to at least a 10-nucleobase portion of a target segment. In certain embodiments, the agents (e.g., antisense oligomers) are complementary to at least an 11-nucleobase portion of a target segment. In certain embodiments, the agents (e.g., antisense oligomers) are complementary to at least a 12-nucleobase portion of a target segment. In certain embodiments, the agents (e.g., antisense oligomers) are complementary to at least a 13-nucleobase portion of a target segment. In certain embodiments, the agents (e.g., antisense oligomers) are complementary to at least a 14-nucleobase portion of a target segment. In certain embodiments, the agents (e.g., antisense oligomers) are complementary to at least a 15-nucleobase portion of a target segment. Also contemplated are antisense oligomers that are complementary to at least a 9, 10, 11, 12, 13, 14, 15, 16, 17, 18, 19, 20, or more nucleobase portion of a target segment, or a range defined by any two of these values.

### Sequence Identity

[0246] The agents (e.g., antisense oligomers) provided herein can also have a defined percent identity to a particular nucleotide sequence, SEQ ID NO, or portion thereof. As used herein, an antisense oligomer is identical to the sequence disclosed herein if it has the same nucleobase pairing ability. For example, an RNA which contains uracil in place of thymidine in a disclosed DNA sequence would be considered identical to the DNA sequence since both uracil and thymidine pair with adenine. Shortened and lengthened versions of the antisense oligomers described herein as well as oligomers having non-identical bases relative to the antisense oligomers provided herein also are contemplated. The non-identical bases can be adjacent to each other or dispersed throughout the antisense oligomer. Percent identity of an antisense oligomer is calculated according to the number of bases that have identical base pairing relative to the sequence to which it is being compared.

[0247] In certain embodiments, the agents (e.g., antisense oligomers), or portions thereof, are at least 70%, 75%, 80%, 85%, 90%, 95%, 96%, 97%, 98%, 99% or 100% identical to one or more of the agents (e.g., antisense oligomers) or SEQ ID NOs, or a portion thereof, disclosed herein.

[0248] In certain embodiments, a portion of the agent (e.g., antisense oligomer) is compared to an equal length portion of the target nucleic acid. In certain embodiments, an 8, 9, 10, 1 1, 12, 13, 14, 15, 16, 17, 18, 19, 20, 21, 22, 23, 24, or 25 nucleobase portion is compared to an equal length portion of the target nucleic acid.

[0249] In certain embodiments, a portion of the antisense oligonucleotide is compared to an equal length portion of the target nucleic acid. In certain embodiments, an 8, 9, 10, 1 1, 12, 13, 14, 15, 16, 17, 18, 19, 20, 21, 22, 23, 24, or 25 nucleobase portion is compared to an equal length portion of the target nucleic acid.

### Modifications

[0250] In some embodiments, an antisense oligomer provided herein can have one or more chemical modifications as compared to a naturally occurring nucleotide (or a native form of the antisense oligomer) that has the same or comparable polynucleotide sequence. Modifications to antisense oligomers encompass substitutions or changes to internucleoside linkages, sugar moieties, or nucleobases. Modified antisense oligomers can be preferred over native forms because of desirable properties such as, for example, enhanced cellular uptake, enhanced affinity for nucleic acid target, increased stability in the presence of nucleases, or increased inhibitory activity.

[0251] Chemically modified nucleosides can be employed to increase the binding affinity of a shortened or truncated antisense oligonucleotide for its target nucleic acid. Consequently, comparable results can often be obtained with shorter antisense oligomers that have such chemically modified nucleosides.

[0252] A nucleoside can be a base-sugar combination. The nucleobase (also known as base) portion of the nucleoside can be a heterocyclic base moiety in native form. Nucleotides are nucleosides that further include a phosphate group covalently linked to the sugar portion of the nucleoside. For those nucleosides that include a pentofuranosyl sugar, the phosphate group can be linked to the 2′, 3′, or 5′ hydroxyl moiety of the sugar. Oligonucleotides are formed through the covalent linkage of adjacent nucleosides to one another, to form a linear polymeric oligonucleotide. Within the oligonucleotide structure, the phosphate groups are commonly referred to as forming the internucleoside linkages of the oligonucleotide.

### Modified Internucleoside Linkages

[0253] The naturally occurring internucleoside linkage of RNA and DNA is a 3′ to 5′ phosphodiester linkage. Antisense oligomers provided herein can have one or more modified, i.e., non-naturally occurring, internucleoside linkages. Antisense oligomers having one or more modified internucleotide linkages can have desirable properties such as, for example, enhanced cellular uptake, enhanced affinity for target nucleic acids, and increased stability in the presence of nucleases.

[0254] Oligonucleotides having modified internucleoside linkages can include internucleoside linkages that retain a phosphorus atom as well as internucleoside linkages that do not have a phosphorus atom. Representative phosphorus containing internucleoside linkages include, but are not limited to, phosphodiesters, phosphotriesters, methylphosphonates, phosphoramidate, and phosphorothioates.

[0255] In certain embodiments, antisense oligomers targeted to a SYNGAP nucleic acid comprise one or more modified internucleoside linkages. In certain embodiments, the modified internucleoside linkages are interspersed throughout the antisense oligomer. In certain embodiments, the modified internucleoside linkages are phosphorothioate linkages. In certain embodiments, each internucleoside linkage of an antisense oligomer is a phosphorothioate internucleoside linkage.

### Modified Sugar Moieties

[0256] Antisense oligomers provided herein can contain one or more nucleosides wherein the sugar group has been modified. Such sugar modified nucleosides can impart enhanced nuclease stability, increased binding affinity, or some other beneficial biological property to the antisense oligomers. In certain embodiments, nucleosides comprise chemically modified ribofuranose ring moieties.

[0257] Examples of chemically modified ribofuranose rings include without limitation, addition of substitute groups (including 5′ and 2′ substituent groups, bridging of non-geminal ring atoms to form bicyclic nucleic acids (BNA), replacement of the ribosyl ring oxygen atom with S, N(R), or C(R₁)(R₂) (R, R₁ and R₂ are each independently H, C₁-C₁₂ alkyl or a protecting group) and combinations thereof. Examples of chemically modified sugars include 2′-F-5′-methyl substituted nucleoside (see PCT International Application WO 2008/101157 for other disclosed 5′,2′-bis substituted nucleosides) or replacement of the ribosyl ring oxygen atom with S with further substitution at the 2′-position (see published U.S. Patent Application US2005-0130923, published on Jun. 16, 2005) or alternatively 5′-substitution of a BNA (see PCT International Application WO 2007/134181 wherein LNA is substituted with for example a 5′-methyl or a 5′-vinyl group).

[0258] Examples of nucleosides having modified sugar moieties include without limitation nucleosides comprising 5′-vinyl, 5′-methyl (R or S), 4′-S, 2′-F, 2′-OCH₃, 2′-OCH₂CH₃, 2′-OCH₂CH₂F, 2′-NMA, and 2′-O(CH₂)₂OCH₃ substituent groups. The substituent at the 2′ position can also be selected from allyl, amino, azido, thio, O-allyl, O—C₁-C₁₀ alkyl, OCF₃, OCH₂F, O(CH₂)₂SCH₃, O(CH₂)₂—O—N(Rₘ)(Rₙ), O—CH₂—C(═O)—N(Rₘ)(Rₙ), and O—CH₂—C(═O)—N(Rₗ)—(CH₂)₂—N(Rₘ)(Rₙ), where each Rₗ, Rₘ and Rₙ is, independently, H or substituted or unsubstituted C₁-C₁₀ alkyl.

[0259] As used herein, “bicyclic nucleosides” can refer to modified nucleosides comprising a bicyclic sugar moiety. Examples of bicyclic nucleosides include without limitation nucleosides comprising a bridge between the 4′ and the 2′ ribosyl ring atoms. In certain embodiments, antisense oligomers provided herein include one or more bicyclic nucleosides comprising a 4′ to 2′ bridge. Examples of such 4′ to 2′ bridged bicyclic nucleosides, include but are not limited to one of those described in U.S. Pat. Nos. 7,399,845, 8,278,283, 7,696,345, 7,427,672, 8,278,426, 6,268,490; 6,525,191; 6,670,461; 6,770,748; 6,794,499; 7,034,133; 7,053,207, 7,399,845, 7,547,684, 7,741,457, and 7,696,345; U.S. Patent Nos.; U.S. Patent Publication No. US2008-0039618; and Chattopadhyaya et al., J. Org. Chem., 2009, 74, 1 18-134); Singh et al., Chem. Commun., 1998, 4, 455-456; Koshkin et al., Tetrahedron, 1998, 54, 3607-3630; Wahlestedt et al., Proc. Natl. Acad. Sci. U.S.A, 2000, 97, 5633-5638; Kumar et al., Bioorg. Med. Chem. Lett., 1998, 8, 2219-2222; Singh et al., J. Org. Chem., 1998, 63, 10035-10039; Srivastava et al., J. Am. Chem. Soc, 2007, 129(26) 8362-8379; Elayadi et al., Curr. Opinion Invest. Drugs, 2001, 2, 558-561; Braasch et al., Chem. Biol, 2001, 8, 1-7; and Orum et al., Curr. Opinion Mol. Ther., 2001, 3, 239-243. Each of the foregoing bicyclic nucleosides can be prepared having one or more stereochemical sugar configurations including for example a-L-ribofuranose and β-D-ribofuranose (see PCT international application PCT/DK98/00393, published on Mar. 25, 1999 as WO 99/14226). In certain embodiments, bicyclic sugar moieties of BNA nucleosides include, but are not limited to, described in U.S. Pat. No. 11,129,844.

[0260] The synthesis and preparation of the methyleneoxy (4′-CH₂—O-2′) BNA monomers adenine, cytosine, guanine, 5-methyl-cytosine, thymine, and uracil, along with their oligomerization, and nucleic acid recognition properties have been described (Koshkin et al., Tetrahedron, 1998, 54, 3607-3630).

[0261] As used herein, “4′-2′ bicyclic nucleoside” or “4′ to 2′ bicyclic nucleoside” can refer to a bicyclic nucleoside comprising a furanose ring comprising a bridge connecting two carbon atoms of the furanose ring connects the 2′ carbon atom and the 4′ carbon atom of the sugar ring.

[0262] As used herein, “monocyclic nucleosides” can refer to nucleosides comprising modified sugar moieties that are not bicyclic sugar moieties. In certain embodiments, the sugar moiety, or sugar moiety analogue, of a nucleoside is modified or substituted at any position.

[0263] As used herein, “2′-modified sugar” can mean a furanosyl sugar modified at the 2′ position. In certain embodiments, such modifications include substituents selected from: a halide, including, but not limited to substituted and unsubstituted alkoxy, substituted and unsubstituted thioalkyl, substituted and unsubstituted amino alkyl, substituted and unsubstituted alkyl, substituted and unsubstituted allyl, and substituted and unsubstituted alkynyl. In certain embodiments, 2′ modifications are selected from substituents including, but not limited to: O[(CH₂)ₙO]ₘCH₃, O(CH₂)ₙNH₂, O(CH₂)ₙCH₃, O(CH₂)ₙF, O(CH₂)ₙONH₂, OCH₂C(═O)N(H)CH₃ and O(CH₂)ₙON[(CH₂)ₙCH₃]₂, where n and m are from 1 to about 10. Other 2′-substituent groups can also be selected from: C₁-C₁₂ alkyl, substituted alkyl, alkenyl, alkynyl, alkaryl, aralkyl, O-alkaryl or O-aralkyl, SH, SCH₃, OCN, CI, Br, CN, F, CF₃, OCF₃, SOCH₃, SO₂CH₃, ONO₂, NO₂, N₃, NH₂, heterocycloalkyl, heterocycloalkaryl, aminoalkylamino, polyalkylamino, substituted silyl, an RNA cleaving group, a reporter group, an intercalator, a group for improving pharmacokinetic properties, or a group for improving the pharmacodynamic properties of an antisense oligomer, and other substituents having similar properties. In certain embodiments, modified nucleosides comprise a 2′-MOE side chain (Baker et al., J. Biol. Chem., 1997, 272, 11944-12000). Such 2′-MOE substitution have been described as having improved binding affinity compared to unmodified nucleosides and to other modified nucleosides, such as 2′-O-methyl, O-propyl, and O-aminopropyl. Oligonucleotides having the 2′-MOE substituent also have been shown to be antisense inhibitors of gene expression with promising features for in vivo use (Martin, Helv. Chim. Acta, 1995, 78, 486-504; Altmann et al., Chimia, 1996, 50, 168-176; Altmann et al., Biochem. Soc. Trans., 1996, 24, 630-637; and Altmann et al., Nucleosides Nucleotides, 1997, 16, 917-926).

[0264] As used herein, “2′-NMA” can mean a —O—CH₂—C(═O)—NH—CH₃ group in place of the 2′-OH group of a ribosyl sugar moiety. A “2′-NMA sugar moiety” or “2′-NMA moiety” is a sugar moiety with a 2′-O—CH₂—C(═O)—NH—CH₃ group in place of the 2′-OH group of a ribosyl sugar moiety. Unless otherwise indicated, a 2′-NMA sugar moiety is in the β-D configuration. “NMA” can mean O—N-methyl acetamide.

[0265] As used herein, “2′-NMA nucleoside” can mean a nucleoside comprising a 2′-NMA sugar moiety.

[0266] As used herein, “2′-F” can refer to a nucleoside comprising a sugar comprising a fluoro group at the 2′ position.

[0267] As used herein, “2′-OMe” or “2′-OCH₃” or “2′-O-methyl” each can refer to a nucleoside comprising a sugar comprising an —OCH₃ group at the 2′ position of the sugar ring.

[0268] As used herein, “MOE” or “2′-MOE” or “2′-OCH₂CH₂OCH₃” or “2′-O-methoxyethyl” each refers to a nucleoside comprising a sugar comprising a —OCH₂CH₂OCH₃ group at the 2′ position of the sugar ring.

[0269] In certain embodiments, one or more of the plurality of nucleosides is modified. In certain embodiments, an oligonucleotide comprises one or more ribonucleosides (RNA) and/or deoxyribonucleosides (DNA). In certain embodiments, an oligonucleotide comprises a mix of one or more ribonucleosides (RNA) and deoxyribonucleosides (DNA).

[0270] Many other bicyclo and tricyclo sugar surrogate ring systems are also known in the art that can be used to modify nucleosides for incorporation into antisense oligomers (see for example review article: Leumann, Bioorg. Med. Chem., 2002, 10, 841-854). Such ring systems can undergo various additional substitutions to enhance activity.

[0271] Methods for the preparations of modified sugars are well known to those skilled in the art.

[0272] In nucleotides having modified sugar moieties, the nucleobase moieties (natural, modified or a combination thereof) are maintained for hybridization with an appropriate nucleic acid target.

[0273] In certain embodiments, antisense oligomers comprise one or more nucleosides having modified sugar moieties. In certain embodiments, the modified sugar moiety is 2′-MOE. In certain embodiments, the 2′-MOE modified nucleosides are arranged in a gapmer motif. In certain embodiments, the modified sugar moiety is a bicyclic nucleoside having a (4′-CH(CH₃)—O-2′) bridging group. In certain embodiments, the (4′-CH(CH₃)—O-2′) modified nucleosides are arranged throughout the wings of a gapmer motif.

[0274] “5′-methylcytosine” can mean a cytosine modified with a methyl group attached to the 5′ position. A 5′-methylcytosine is a modified nucleobase.

[0275] “5′-methyluracil” can mean a uracil modified with a methyl group attached to the 5′ position. A 5′-methyluracil is a modified nucleobase.

[0276] “5′-methylthymine” can mean a thymine modified with a methyl group attached to the 5′ position. A 5′-methylthymine is a modified nucleobase.

[0277] In some cases, antisense oligomers provided herein comprise 5′-methylcytosine, 5′-methyluracil, 5′-methylthymine, or a combination thereof. In some cases, each cytosine in the antisense oligomer is methylated, i.e., having a methyl group attached to the 5′ position. In some cases, each uracil in the antisense oligomer is methylated, i.e., having a methyl group attached to the 5′ position. In some cases, the antisense oligomer has 1, 2, 3, 4, 5, 6, 7, 8, or more 5′-methylcytosine. In some cases, the antisense oligomer has 1, 2, 3, 4, 5, 6, 7, 8, or more 5′-methyluracil. In some cases, the antisense oligomer has both methylcytosine and methyluracil.

### Pharmaceutical Compositions and Methods of Treatment

[0278] In some aspects, provided herein are pharmaceutical compositions comprising an agent of the present disclosure, e.g., an antisense oligomer, or a vector encoding the agent.

[0279] Pharmaceutical compositions or formulations comprising the agent, e.g., antisense oligomer, or a vector encoding the agent, of the described compositions and for use in any of the described methods can be prepared according to conventional techniques well known in the pharmaceutical industry and described in the published literature. In some embodiments, a pharmaceutical composition or formulation for treating a subject comprises an effective amount of any antisense oligomer as described herein, or a pharmaceutically acceptable salt, solvate, hydrate or ester thereof. The pharmaceutical formulation comprising an antisense oligomer may further comprise a pharmaceutically acceptable excipient, diluent, or carrier.

[0280] Agents (e.g., antisense oligomers) or vectors provided herein can be admixed with pharmaceutically acceptable active or inert substances for the preparation of pharmaceutical compositions or formulations. An agent (e.g., antisense oligomer) targeted to a SYNGAP nucleic acid can be utilized in pharmaceutical compositions by combining the agent with a suitable pharmaceutically acceptable diluent or carrier. A pharmaceutically acceptable diluent can include phosphate-buffered saline (PBS), artificial cerebrospinal fluid (aCSF), physiological saline, or any other suitable solutions.

[0281] Pharmaceutically acceptable salts are suitable for use in contact with the tissues of humans and lower animals without undue toxicity, irritation, allergic response, etc., and are commensurate with a reasonable benefit/risk ratio. (See, e.g., S. M. Berge, et al., J. Pharmaceutical Sciences, 66: 1-19 (1977), incorporated herein by reference for this purpose. The salts can be prepared in situ during the final isolation and purification of the compounds, or separately by reacting the free base form with a suitable organic acid. Examples of pharmaceutically acceptable, nontoxic acid addition salts are salts of an amino group formed with inorganic acids such as hydrochloric acid, hydrobromic acid, phosphoric acid, sulfuric acid and perchloric acid or with organic acids such as acetic acid, oxalic acid, maleic acid, tartaric acid, citric acid, succinic acid, or malonic acid or by using other documented methodologies such as ion exchange. Other pharmaceutically acceptable salts include adipate, alginate, ascorbate, aspartate, benzenesulfonate, benzoate, bisulfate, borate, butyrate, camphorate, camphorsulfonate, citrate, cyclopentanepropionate, digluconate, dodecylsulfate, ethanesulfonate, formate, fumarate, glucoheptonate, glycerophosphate, gluconate, hemisulfate, heptanoate, hexanoate, hydroiodide, 2-hydroxy-ethanesulfonate, lactobionate, lactate, laurate, lauryl sulfate, malate, maleate, malonate, methanesulfonate, 2-naphthalenesulfonate, nicotinate, nitrate, oleate, oxalate, palmitate, pamoate, pectinate, persulfate, 3-phenylpropionate, phosphate, picrate, pivalate, propionate, stearate, succinate, sulfate, tartrate, thiocyanate, p-toluenesulfonate, undecanoate, valerate salts, and the like. Representative alkali or alkaline earth metal salts include sodium, lithium, potassium, calcium, magnesium, and the like. Further pharmaceutically acceptable salts include, when appropriate, nontoxic ammonium, quaternary ammonium, and amine cations formed using counterions such as halide, hydroxide, carboxylate, sulfate, phosphate, nitrate, loweralkyl sulfonate, and aryl sulfonate.

[0282] In some embodiments, the compositions are formulated into any of many possible dosage forms such as, but not limited to, tablets, capsules, gel capsules, liquid syrups, soft gels, suppositories, and enemas. In embodiments, the compositions are formulated as suspensions in aqueous, non-aqueous or mixed media. Aqueous suspensions may further contain substances that increase the viscosity of the suspension including, for example, sodium carboxymethylcellulose, sorbitol and/or dextran. The suspension may also contain stabilizers. In embodiments, a pharmaceutical formulation or composition of the present disclosure includes, but is not limited to, a solution, emulsion, microemulsion, foam or liposome-containing formulation (e.g., cationic or noncationic liposomes).

[0283] The pharmaceutical composition or formulation described herein may comprise one or more penetration enhancers, carriers, excipients or other active or inactive ingredients as appropriate and well known to those of skill in the art or described in the published literature. In embodiments, liposomes also include sterically stabilized liposomes, e.g., liposomes comprising one or more specialized lipids. These specialized lipids result in liposomes with enhanced circulation lifetimes. In embodiments, a sterically stabilized liposome comprises one or more glycolipids or is derivatized with one or more hydrophilic polymers, such as a polyethylene glycol (PEG) moiety. In some embodiments, a surfactant is included in the pharmaceutical formulation or compositions. The use of surfactants in drug products, formulations and emulsions is well known in the art. In embodiments, the present disclosure employs a penetration enhancer to effect the efficient delivery of the antisense oligonucleotide, e.g., to aid diffusion across cell membranes and/or enhance the permeability of a lipophilic drug. In some embodiments, the penetration enhancers are a surfactant, fatty acid, bile salt, chelating agent, or non-chelating nonsurfactant.

[0284] In some embodiments, the pharmaceutical formulation comprises multiple agents (e.g., antisense oligomers). In embodiments, the agent (e.g., antisense oligomer) or a vector encoding the agent is administered in combination with another drug or therapeutic agent.

[0285] Pharmaceutical compositions comprising antisense oligomers can encompass any pharmaceutically acceptable salts, esters, or salts of such esters, or any other oligonucleotide which, upon administration to an animal, including a human, is capable of providing (directly or indirectly) the biologically active metabolite or residue thereof. Accordingly, for example, the disclosure is also drawn to pharmaceutically acceptable salts of antisense oligomers, prodrugs, pharmaceutically acceptable salts of such prodrugs, and other bioequivalents. Suitable pharmaceutically acceptable salts include, but are not limited to, sodium and potassium salts.

[0286] A prodrug can include the incorporation of additional nucleosides at one or both ends of an antisense oligomer which are cleaved by endogenous nucleases within the body, to form the active antisense oligomer.

[0287] Antisense oligomers disclosed herein can be covalently linked to one or more moieties or conjugates which enhance the activity, cellular distribution, or cellular uptake of the resulting antisense oligomers. Conjugate groups can include cholesterol moieties and lipid moieties. Additional conjugate groups can include carbohydrates, phospholipids, biotin, phenazine, folate, phenanthridine, anthraquinone, acridine, fluoresceins, rhodamines, coumarins, and dyes.

[0288] Antisense oligomers of the present disclosure can also be modified to have one or more stabilizing groups that are generally attached to one or both termini of antisense oligomers to enhance properties such as, for example, nuclease stability. Included in stabilizing groups are cap structures. These terminal modifications can protect the antisense oligomer having terminal nucleic acid from exonuclease degradation, and can help in delivery and/or localization within a cell. The cap can be present at the 5′-terminus (5′-cap), or at the 3′-terminus (3′-cap), or can be present on both termini. Cap structures can include, for example, inverted deoxy abasic caps. Further 3′ and 5′-stabilizing groups that can be used to cap one or both ends of an antisense oligomer to impart nuclease stability can include those disclosed in WO 03/004602 published on Jan. 16, 2003.

### Autosomal Dominant Mental Retardation and SYNGAP1 Gene

[0289] Autosomal dominant mental retardation is an autosomal dominant neurodevelopmental disorder characterized by significantly impaired intellectual functioning and adaptive behaviors, one cause of which is haploinsufficiency of SYNGAP1 gene expression. SYNGAP1 codes for SYNGAP1 protein, which is a ras GTPase-activating protein involved in cognitive development and proper synapse function amongst neurons. SYNGAP1 is known to be involved in synaptic plasticity, axon formation, and AMPA receptor trafficking. Generally, SYNGAP1 activity is essential for development and survival. SYNGAP1 deficiencies may be caused by sporadic mutation or alternative splicing events. Deficient SYNGAP1 activity may result in mental retardation, or intellectual disability, epileptic encephalopathy, or autism.

[0290] The present disclosure provides compositions and methods for modulating alternative splicing of SYNGAP1 to modulate the production of functional protein-coding mature mRNA, and thus, translated functional SYNGAP1 protein. These compositions and methods include antisense oligomers (ASOs) that can promote canonical splicing of SYNGAP1 pre-mRNA. In various embodiments, functional SYNGAP1 protein can be increased using the methods of the disclosure to treat a condition caused by SYNGAP1 protein deficiency. In some embodiments, the condition is autosomal dominant mental retardation. In other embodiments, the condition is epileptic encephalopathy or autism.

[0291] In some embodiments, the methods of the invention are used to increase functional SYNGAP1 protein production to treat a condition in a subject in need thereof. In some embodiments, the subject has a condition in which SYNGAP1 is not necessarily deficient relative to wild-type, but where an increase in SYNGAP1 mitigates the condition nonetheless. In some embodiments, the condition is caused by sporadic mutation. In some embodiments, the methods of the invention are used to reduce functional SYNGAP1 protein production to treat a condition in a subject in need thereof. In some embodiments, the methods of the invention are used to modulate functional SYNGAP1 protein production to treat a condition in a subject in need thereof.

### Target Genes

[0292] The present disclosure provides compositions and methods for modulating alternative splicing of a target to modulate the production of functional protein-coding mature mRNA, and thus, translated functional the target protein, wherein the target is SYNGAP1. These compositions and methods include antisense oligomers (ASOs) that can promote canonical splicing of the target pre-mRNA, wherein the target is SYNGAP1. In various embodiments, functional target protein can be increased using the methods of the disclosure to treat a condition caused by target protein deficiency, wherein the target is SYNGAP1. In some embodiments, the condition is autosomal dominant mental retardation. In other embodiments, the condition is epileptic encephalopathy or autism.

[0293] In some embodiments, the methods of the invention are used to increase functional the target protein production to treat a condition in a subject in need thereof, wherein the target is any one selected from the group consisting of SYNGAP1. In some embodiments, the subject has a condition in which the target protein is not necessarily deficient relative to wild-type, but where an increase in the target protein mitigates the condition nonetheless, wherein the target is SYNGAP1. In some embodiments, the condition is caused by sporadic mutation. In some embodiments, the methods of the invention are used to reduce functional target protein production to treat a condition in a subject in need thereof, wherein the target is SYNGAP1. In some embodiments, the methods of the invention are used to modulate functional target protein production to treat a condition in a subject in need thereof, wherein the target is SYNGAP1.

### Splicing

[0294] Intervening sequences in RNA sequences or introns are removed by a large and highly dynamic RNA-protein complex termed the spliceosome, which orchestrates complex interactions between primary transcripts, small nuclear RNAs (snRNAs) and a large number of proteins. Spliceosomes assemble ad hoc on each intron in an ordered manner, starting with recognition of the 5′ splice site (5′ss) by U1 snRNA or the 3′splice site (3′ss) by the U2 pathway, which involves binding of the U2 auxiliary factor (U2AF) to the 3′ss region to facilitate U2 binding to the branch point sequence (BPS). U2AF is a stable heterodimer composed of a U2AF2-encoded 65-kD subunit (U2AF65), which binds the polypyrimidine tract (PPT), and a U2AF1-encoded 35-kD subunit (U2AF35), which interacts with highly conserved AG dinucleotides at 3′ss and stabilizes U2AF65 binding. In addition to the BPS/PPT unit and 3′ss/5′ss, accurate splicing requires auxiliary sequences or structures that activate or repress splice site recognition, known as intronic or exonic splicing enhancers or silencers. These elements allow genuine splice sites to be recognized among a vast excess of cryptic or pseudo-sites in the genome of higher eukaryotes, which have the same sequences but outnumber authentic sites by an order of magnitude. Although they often have a regulatory function, the exact mechanisms of their activation or repression are poorly understood.

[0295] The decision of whether to splice or not to splice can be typically modeled as a stochastic rather than deterministic process, such that even the most defined splicing signals can sometimes splice incorrectly. However, under normal conditions, pre-mRNA splicing proceeds at surprisingly high fidelity. This is attributed in part to the activity of adjacent cis-acting auxiliary exonic and intronic splicing regulatory elements (ESRs or ISRs). Typically, these functional elements are classified as either exonic or intronic splicing enhancers (ESEs or ISEs) or silencers (ESSs or ISSs) based on their ability to stimulate or inhibit splicing, respectively. Although there is now evidence that some auxiliary cis-acting elements may act by influencing the kinetics of spliceosome assembly, such as the arrangement of the complex between U1 snRNP and the 5′ss, it seems very likely that many elements function in concert with trans-acting RNA-binding proteins (RBPs). For example, the serine- and arginine-rich family of RBPs (SR proteins) is a conserved family of proteins that have a key role in defining exons. SR proteins promote exon recognition by recruiting components of the pre-spliceosome to adjacent splice sites or by antagonizing the effects of ESSs in the vicinity. The repressive effects of ESSs can be mediated by members of the heterogeneous nuclear ribonucleoprotein (hnRNP) family and can alter recruitment of core splicing factors to adjacent splice sites. In addition to their roles in splicing regulation, silencer elements are suggested to have a role in repression of pseudo-exons, sets of decoy intronic splice sites with the typical spacing of an exon but without a functional open reading frame. ESEs and ESSs, in cooperation with their cognate trans-acting RBPs, represent important components in a set of splicing controls that specify how, where and when mRNAs are assembled from their precursors.

[0296] Alternative splicing is a regulated process during gene expression that can result in multiple isoforms of mature mRNA transcripts that are processed from a single primary mRNA transcript that is transcribed from a single gene, and the resultant multiple proteins that are translated from at least some of the multiple mature mRNA isoforms. In this process, particular exons of a gene may be included within or excluded from the final, processed mRNA produced from that gene. Consequently, the proteins translated from alternatively spliced mRNAs will contain differences in their amino acid sequence and, in some cases, in their biological functions.

[0297] The sequences marking the exon-intron boundaries are degenerate signals of varying strengths that can occur at high frequency within human genes. In multi-exon genes, different pairs of splice sites can be linked together in many different combinations, creating a diverse array of transcripts from a single gene. This is commonly referred to as alternative pre-mRNA splicing. Although most mRNA isoforms produced by alternative splicing can be exported from the nucleus and translated into functional polypeptides, different mRNA isoforms from a single gene can vary greatly in their translation efficiency. Those mRNA isoforms with premature termination codons (PTCs) at least 50 bp upstream of an exon junction complex are likely to be targeted for degradation by the nonsense-mediated mRNA decay (NMD) pathway. Mutations in traditional (BPS/PPT/3′ss/5′ss) and auxiliary splicing motifs can cause aberrant splicing, such as exon skipping or cryptic (or pseudo-) exon inclusion or splice-site activation, and contribute significantly to human morbidity and mortality. Both aberrant and alternative splicing patterns can be influenced by natural DNA variants in exons and introns.

[0298] Given that exon-intron boundaries can occur at any of the three positions of a codon, it is clear that only a subset of alternative splicing events can maintain the canonical open reading frame. For example, only exons that are evenly divisible by 3 can be skipped or included in the mRNA without any alteration of reading frame. Splicing events that do not have compatible phases will induce a frame-shift. Unless reversed by downstream events, frame-shifts can certainly lead to one or more PTCs, probably resulting in subsequent degradation by NMD. NMD is a translation-coupled mechanism that eliminates mRNAs containing PTCs. NMD can function as a surveillance pathway that exists in all eukaryotes. NMD can reduce errors in gene expression by eliminating mRNA transcripts that contain premature stop codons. Translation of these aberrant mRNAs could, in some cases, lead to deleterious gain-of-function or dominant-negative activity of the resulting proteins. NMD targets not only transcripts with PTCs but also a broad array of mRNA isoforms expressed from many endogenous genes, suggesting that NMD is a master regulator that drives both fine and coarse adjustments in steady-state RNA levels in the cell.

[0299] An NMD-inducing exon (“NIE” or “NMD exon”) is an exon or a pseudo-exon that is a region within an intron and can activate the NMD pathway if included in a mature RNA transcript. In constitutive splicing events, the intron containing an NMD exon is usually spliced out, but the intron or a portion thereof (e.g., NMD exon) may be retained during alternative or aberrant splicing events. Mature mRNA transcripts containing such an NMD exon may be non-productive due to frame shifts which induce the NMD pathway. Inclusion of a NMD exon in mature RNA transcripts may downregulate gene expression. mRNA transcripts containing an NMD exon may be referred to as “NIE-containing mRNA” or “NMD exon mRNA” in the current disclosure.

[0300] Cryptic (or pseudo-splice sites) have the same splicing recognition sequences as genuine splice sites but are not used in splicing reactions. They outnumber genuine splice sites in the human genome by an order of magnitude and are normally repressed by thus far poorly understood molecular mechanisms. Cryptic 5′ splice sites have the consensus NNN/GUNNNN or NNN/GCNNNN where N is any nucleotide and/is the exon-intron boundary. Cryptic 3′ splice sites have the consensus NAG/N. Their activation is positively influenced by surrounding nucleotides that make them more similar to the optimal consensus of authentic splice sites, namely MAG/GURAGU and YAG/G, respectively, where M is C or A, R is G or A, and Y is C or U.

[0301] Splice sites and their regulatory sequences can be readily identified by a skilled person using suitable algorithms publicly available, listed for example in Kralovicova, J. and Vorechovsky, I. (2007) Global control of aberrant splice site activation by auxiliary splicing sequences: evidence for a gradient in exon and intron definition. Nucleic Acids Res., 35, 6399-6413.

[0302] The cryptic splice sites or splicing regulatory sequences may compete for RNA-binding proteins, such as U2AF, with a splice site of the NMD exon. In some embodiments, an agent may bind to a cryptic splice site or splicing regulatory sequence to prevent binding of RNA-binding proteins and thereby favor binding of RNA-binding proteins to the NMD exon splice sites.

[0303] In some embodiments, the cryptic splice site may not comprise the 5′ or 3′ splice site of the NMD exon. In some embodiments, the cryptic splice site may be at least 10 nucleotides, at least 20 nucleotides, at least 50 nucleotides, at least 100 nucleotides or at least 200 nucleotides upstream of the NMD exon 5′ splice site. In some embodiments, the cryptic splice site may be at least 10 nucleotides, at least 20 nucleotides, at least 50 nucleotides, at least 100 nucleotides, at least 200 nucleotides downstream of the NMD exon 3′ splice site.

### Target Transcripts

[0304] In some embodiments, the methods of the present disclosure exploit the presence of non-sense mediated RNA decay alternative exon-containing pre-mRNA (NSAE pre-mRNA) transcribed from a gene. In some embodiments, the methods of the present disclosure exploit the presence of non-sense mediated RNA decay alternative exon-containing pre-mRNA (NSAE pre-mRNA) transcribed from the SYNGAP1 gene. Canonical splicing of the identified SYNGAP1 NSAE pre-mRNA transcripts to produce functional, mature SYNGAP1 mRNA can be induced using a therapeutic agent, such as an ASO, that promotes constitutive splicing of SYNGAP1 NSAE pre-mRNA at the canonical splice sites. In some embodiments, the resulting functional, mature SYNGAP1 mRNA can be translated normally, thereby increasing the amount of functional SYNGAP1 protein in the patient's cells and preventing symptoms of SYNGAP1 associated disease. In some embodiments, canonical splicing of the identified SYNGAP1 NSAE pre-mRNA transcripts to produce functional, mature SYNGAP1 mRNA may be reduced using a therapeutic agent, such as an ASO, that inhibits constitutive splicing of SYNGAP1 NSAE pre-mRNA at the canonical splice sites. In some embodiments, the resulting functional, mature SYNGAP1 mRNA can be translated abnormally, thereby decreasing the amount of functional SYNGAP1 protein in the patient's cells and preventing symptoms of SYNGAP1 associated disease.

[0305] In some embodiments, the methods of the present disclosure exploit the presence of non-sense mediated RNA decay alternative exon-containing pre-mRNA (NSAE pre-mRNA) transcribed from the target gene, wherein the target is SYNGAP1. Canonical splicing of the identified target NSAE pre-mRNA transcripts to produce the functional, mature target mRNA can be induced using a therapeutic agent, such as an ASO, that promotes constitutive splicing of the target NSAE pre-mRNA at the canonical splice sites. In some embodiments, the resulting functional, mature target mRNA can be translated normally, thereby increasing the amount of the functional target protein in the patient's cells, and preventing symptoms of the target associated disease. In some embodiments, canonical splicing of the identified target NSAE pre-mRNA transcripts to produce functional, mature target mRNA may be reduced using a therapeutic agent, such as an ASO, that inhibits constitutive splicing of target NSAE pre-mRNA at the canonical splice sites. In some embodiments, the resulting functional, mature target mRNA can be translated abnormally, thereby decreasing the amount of functional target protein in the patient's cells, and preventing symptoms of the target associated disease.

[0306] In various embodiments, the present disclosure provides a therapeutic agent that can target SYNGAP1 pre-mRNA to modulate splicing or protein expression level. The therapeutic agent can be a small molecule, nucleic acid oligomer, or polypeptide. In some embodiments, the therapeutic agent is an ASO. Various regions or sequences on the SYNGAP1 pre-mRNA can be targeted by a therapeutic agent, such as an ASO. In some embodiments, the ASO targets a SYNGAP1 NSAE pre-mRNA transcribed from the SYNGAP1 gene. In some embodiments, the ASO targets a SYNGAP1 NSAE pre-mRNA transcribed from the SYNGAP1 gene comprising non-sense mediated RNA decay alternative exons (NSAEs). In some embodiments, the NSAE is comprises a portion of canonical exon 11 or the entire canonical exon 11 of a SYNGAP1 pre-mRNA transcript. In some embodiments, the NSAE is comprises only a portion of canonical exon 11 of a SYNGAP1 pre-mRNA transcript, or canonical exon 11 of a SYNGAP1 pre-mRNA transcript and at least a portion of the intron upstream of exon 11 of the SYNGAP1 pre-mRNA transcript. In some embodiments, the NSAE is included in a SYNGAP1 pre-mRNA transcript due to aberrant splicing. In some embodiments, the aberrant splicing is caused by a mutation in the SYNGAP1 gene. In some embodiments, the mutation is a G→A mutation at position −1 of the exon 11 splice donor (E8SJM, Exon 11 Splice Junction Mutation, c.894G>A). In some embodiments, the ASO targets a sequence within a NSAE of a SYNGAP1 pre-mRNA transcript. In some embodiments, the NSAE is comprises a portion of canonical exon 11 or the entire canonical exon 11 of a SYNGAP1 pre-mRNA transcript. In some embodiments, the ASO targets a sequence within exon 10 or 11 of a SYNGAP1 pre-mRNA transcript. In some embodiments, the ASO targets an exon sequence upstream (or 5′) from the 5′ splice site of exon 11 of a SYNGAP1 pre-mRNA transcript. In some embodiments, the ASO targets an exon sequence downstream (or 3′) from the 3′ splice site of exon 11 of a SYNGAP1 pre-mRNA transcript. In some embodiments, the ASO targets a sequence within an intron flanking the 3′ splice site of a NSAE of a SYNGAP1 pre-mRNA transcript. In some embodiments, the ASO targets a sequence within intron 10 or 11 of a SYNGAP1 pre-mRNA transcript. In some embodiments, the ASO targets an intron sequence upstream (or 5′) from the 3′ splice site of intron 10 or 11 of a SYNGAP1 pre-mRNA transcript. In some embodiments, the ASO targets an intron sequence downstream (or 3′) from the 5′ splice site of intron 10 or 11 of a SYNGAP1 pre-mRNA transcript. In some embodiments, the ASO targets a sequence within an intron flanking the 5′ splice site of a NSAE of a SYNGAP1 pre-mRNA transcript. In some embodiments, the ASO targets a sequence within intron 10 of a SYNGAP1 pre-mRNA transcript. In some embodiments, the ASO targets a sequence within intron 11 of a SYNGAP1 pre-mRNA transcript. In some embodiments, the ASO targets an intron sequence upstream (or 5′) from the 3′ splice site of intron 10 or 11 of a SYNGAP1 pre-mRNA transcript. In some embodiments, the ASO targets an intron sequence downstream (or 3′) from the 5′ splice site of intron 10 or 11 of a SYNGAP1 pre-mRNA transcript. In some embodiments, the ASO targets a sequence comprising an exon-intron boundary of a SYNGAP1 pre-mRNA transcript. In some embodiments, the exon is a NSAE. An exon-intron boundary can refer to the junction of an exon sequence and an intron sequence. In some embodiments, the intron sequence can flank the 5′ end of the NSAE, or the 3′ end of the exon. In some embodiments, the ASO targets a sequence comprising an exon 10-intron 11 boundary of a SYNGAP1 pre-mRNA transcript. In some embodiments, the ASO targets a sequence comprising an intron 10-exon 11 boundary of a SYNGAP1 NSAE pre-mRNA transcript. In some embodiments, the ASO targets a sequence comprising both a portion of an intron and a portion of an exon.

[0307] In various embodiments, the present disclosure provides a therapeutic agent that can target a target pre-mRNA to modulate splicing or protein expression level, wherein the target is SYNGAP1. The therapeutic agent can be a small molecule, nucleic acid oligomer, or polypeptide. In some embodiments, the therapeutic agent is an ASO. Various regions or sequences on the target pre-mRNA can be targeted by a therapeutic agent, such as an ASO. In some embodiments, the ASO targets a target NSAE pre-mRNA transcribed from the target gene. In some embodiments, the ASO targets a target NSAE pre-mRNA transcribed from the target gene comprising non-sense mediated RNA decay alternative exons (NSAEs). In some embodiments, the NSAE is comprises a portion of a canonical exon or the entire canonical exon of a target pre-mRNA transcript. In some embodiments, the NSAE is comprises only a portion of a canonical exon of a target pre-mRNA transcript, or a canonical exon of a target pre-mRNA transcript and at least a portion of the intron upstream of the exon of the target pre-mRNA transcript. In some embodiments, the NSAE is included in a target pre-mRNA transcript due to aberrant splicing. In some embodiments, the aberrant splicing is caused by a mutation in the target gene. In some embodiments, the ASO targets a sequence within a NSAE of a target pre-mRNA transcript. In some embodiments, the NSAE is comprises a portion of a canonical exon or the entire canonical exon of a target pre-mRNA transcript. In some embodiments, the ASO targets a sequence within an exon of a target pre-mRNA transcript. In some embodiments, the ASO targets an exon sequence upstream (or 5′) from the 5′ splice site of an exon of a target pre-mRNA transcript. In some embodiments, the ASO targets an exon sequence downstream (or 3′) from the 3′ splice site of an exon of a target pre-mRNA transcript. In some embodiments, the ASO targets a sequence within an intron flanking the 3′ splice site of a NSAE of a target pre-mRNA transcript. In some embodiments, the ASO targets a sequence within an intron of a target pre-mRNA transcript. In some embodiments, the ASO targets an intron sequence upstream (or 5′) from the 3′ splice site of an intron of a target pre-mRNA transcript. In some embodiments, the ASO targets an intron sequence downstream (or 3′) from the 5′ splice site of an intron of a target pre-mRNA transcript. In some embodiments, the ASO targets a sequence within an intron flanking the 5′ splice site of a NSAE of a target pre-mRNA transcript. In some embodiments, the ASO targets a sequence within an intron of a target pre-mRNA transcript. In some embodiments, the ASO targets an intron sequence upstream (or 5′) from the 3′ splice site of an intron of a target pre-mRNA transcript. In some embodiments, the ASO targets an intron sequence downstream (or 3′) from the 5′ splice site of an intron of a target pre-mRNA transcript. In some embodiments, the ASO targets a sequence comprising an exon-intron boundary of a target pre-mRNA transcript. In some embodiments, the exon is a NSAE. An exon-intron boundary can refer to the junction of an exon sequence and an intron sequence. In some embodiments, the intron sequence can flank the 5′ end of the NSAE, or the 3′ end of the exon. In some embodiments, the ASO targets a sequence comprising an exon-intron boundary of a target pre-mRNA transcript. In some embodiments, the ASO targets a sequence comprising an intron-exon boundary of a target NSAE pre-mRNA transcript. In some embodiments, the ASO targets a sequence comprising both a portion of an intron and a portion of an exon.

[0308] In some embodiments, the ASO targets a sequence about 4 to about 300 nucleotides upstream (or 5′) from the 3′ splice site of a NSAE of a SYNGAP1 pre-mRNA transcript. In some embodiments, the ASO targets a sequence about 1 to about 20 nucleotides, about 20 to about 50 nucleotides, about 50 to about 100 nucleotides, about 100 to about 150 nucleotides, about 150 to about 200 nucleotides, about 200 to about 250 nucleotides, or about 250 to about 300 nucleotides upstream (or 5′) from the 3′ splice site of the NSAE of a SYNGAP1 pre-mRNA transcript. In some embodiments, the ASO may target a sequence more than 300 nucleotides upstream from the 3′ splice site of the NSAE of a SYNGAP1 pre-mRNA transcript. In some embodiments, the ASO targets a sequence about 4 to about 300 nucleotides downstream (or 3′) from the 3′ splice site of a NSAE of a SYNGAP1 pre-mRNA transcript. In some embodiments, the ASO targets a sequence about 1 to about 20 nucleotides, about 20 to about 50 nucleotides, about 50 to about 100 nucleotides, about 100 to about 150 nucleotides, about 150 to about 200 nucleotides, about 200 to about 250 nucleotides, or about 250 to about 300 nucleotides downstream (or 3′) from the 3′ splice site of the NSAE of a SYNGAP1 pre-mRNA transcript. In some embodiments, the ASO may target a sequence more than 300 nucleotides downstream from the 3′ splice site of the NSAE of a SYNGAP1 pre-mRNA transcript. In some embodiments, the ASO targets a sequence about 4 to about 300 nucleotides downstream (or 3′) from the 5′ splice site of the NSAE of a SYNGAP1 pre-mRNA transcript. In some embodiments, the ASO targets a sequence about 1 to about 20 nucleotides, about 20 to about 50 nucleotides, about 50 to about 100 nucleotides, about 100 to about 150 nucleotides, about 150 to about 200 nucleotides, about 200 to about 250 nucleotides, or about 250 to about 300 nucleotides downstream from the 5′ splice site of the NSAE of a SYNGAP1 pre-mRNA transcript. In some embodiments, the ASO targets a sequence more than 300 nucleotides downstream from the 5′ splice site of the NSAE of a SYNGAP1 pre-mRNA transcript. In some embodiments, the ASO targets a sequence about 4 to about 300 nucleotides upstream (or 5′) from the 5′ splice site of the NSAE of a SYNGAP1 pre-mRNA transcript. In some embodiments, the ASO targets a sequence about 1 to about 20 nucleotides, about 20 to about 50 nucleotides, about 50 to about 100 nucleotides, about 100 to about 150 nucleotides, about 150 to about 200 nucleotides, about 200 to about 250 nucleotides, or about 250 to about 300 nucleotides upstream from the 5′ splice site of the NSAE exon of a SYNGAP1 pre-mRNA transcript. In some embodiments, the ASO targets a sequence more than 300 nucleotides upstream from the 5′ splice site of the NSAE exon of a SYNGAP1 pre-mRNA transcript.

[0309] In some embodiments, the ASO targets a sequence about 4 to about 300 nucleotides upstream (or 5′) from the 3′ splice site of a NSAE of a target pre-mRNA transcript, wherein the target is SYNGAP1. In some embodiments, the ASO targets a sequence about 1 to about 20 nucleotides, about 20 to about 50 nucleotides, about 50 to about 100 nucleotides, about 100 to about 150 nucleotides, about 150 to about 200 nucleotides, about 200 to about 250 nucleotides, or about 250 to about 300 nucleotides upstream (or 5′) from the 3′ splice site of the NSAE of a target pre-mRNA transcript. In some embodiments, the ASO may target a sequence more than 300 nucleotides upstream from the 3′ splice site of the NSAE of a target pre-mRNA transcript. In some embodiments, the ASO targets a sequence about 4 to about 300 nucleotides downstream (or 3′) from the 3′ splice site of a NSAE of a target pre-mRNA transcript. In some embodiments, the ASO targets a sequence about 1 to about 20 nucleotides, about 20 to about 50 nucleotides, about 50 to about 100 nucleotides, about 100 to about 150 nucleotides, about 150 to about 200 nucleotides, about 200 to about 250 nucleotides, or about 250 to about 300 nucleotides downstream (or 3′) from the 3′ splice site of the NSAE of a target pre-mRNA transcript. In some embodiments, the ASO may target a sequence more than 300 nucleotides downstream from the 3′ splice site of the NSAE of a target pre-mRNA transcript. In some embodiments, the ASO targets a sequence about 4 to about 300 nucleotides downstream (or 3′) from the 5′ splice site of the NSAE of a target pre-mRNA transcript. In some embodiments, the ASO targets a sequence about 1 to about 20 nucleotides, about 20 to about 50 nucleotides, about 50 to about 100 nucleotides, about 100 to about 150 nucleotides, about 150 to about 200 nucleotides, about 200 to about 250 nucleotides, or about 250 to about 300 nucleotides downstream from the 5′ splice site of the NSAE of a target pre-mRNA transcript. In some embodiments, the ASO targets a sequence more than 300 nucleotides downstream from the 5′ splice site of the NSAE of a target pre-mRNA transcript. In some embodiments, the ASO targets a sequence about 4 to about 300 nucleotides upstream (or 5′) from the 5′ splice site of the NSAE of a target pre-mRNA transcript. In some embodiments, the ASO targets a sequence about 1 to about 20 nucleotides, about 20 to about 50 nucleotides, about 50 to about 100 nucleotides, about 100 to about 150 nucleotides, about 150 to about 200 nucleotides, about 200 to about 250 nucleotides, or about 250 to about 300 nucleotides upstream from the 5′ splice site of the NSAE exon of a target pre-mRNA transcript. In some embodiments, the ASO targets a sequence more than 300 nucleotides upstream from the 5′ splice site of the NSAE exon of a target pre-mRNA transcript.

[0310] In some embodiments, the ASOs disclosed herein target a NSAE pre-mRNA transcribed from a SYNGAP1 genomic sequence. In some embodiments, the ASO targets a NSAE pre-mRNA transcript from a SYNGAP1 genomic sequence comprising a NSAE exon. In some embodiments, the ASO targets a NSAE pre-mRNA transcript from a SYNGAP1 genomic sequence comprising an intron flanking the 3′ splice site of the NSAE exon and an intron flanking the 5′ splice site of a NSAE exon. In some embodiments, the ASO targets a NSAE pre-mRNA transcript comprising a sequence selected from the group consisting of the pre-mRNA transcripts of Table 6. In some embodiments, the ASO targets a SYNGAP1 pre-mRNA sequence comprising a NSAE exon. In some embodiments, the ASO targets a SYNGAP1 pre-mRNA sequence comprising an intron flanking the 3′ splice site of the NSAE exon. In some embodiments, the ASO targets a SYNGAP1 pre-mRNA sequence comprising an intron flanking the 5′ splice site of the NSAE exon. In some embodiments, the transcript is selected from the group consisting of the transcripts of Table 6.

[0311] In some embodiments, the pre-mRNA transcript comprises a sequence with at least about 80%, 85%, 90%, 95%, 96%, 97%, 98%, 99% or 100% sequence identity to a SYNGAP1 pre-mRNA transcript or a complement thereof described herein.

[0312] In some embodiments, the targeted portion of the SYNGAP1 pre-mRNA comprises a sequence with at least 80%, 85%, 90%, 95%, 97%, or 100% sequence identity to a region comprising at least 8 contiguous nucleic acids of a sequence of the pre-mRNA transcripts of Table 6 or a sequence of Table 3, Table 4, Table 5A, Table 5B, or complements thereof.

[0313] In some embodiments, the targeted portion of the SYNGAP1 pre-mRNA comprises a sequence with at least 80%, 85%, 90%, 95%, 97%, or 100% sequence identity to a region comprising at least 8 contiguous nucleic acids of a sequence selected from the group consisting of the sequences of Table 3, Table 4, Table 5A, Table 5B, and complements thereof. In some embodiments, the targeted portion of the SYNGAP1 pre-mRNA comprises a sequence with at least 80%, 85%, 90%, 95%, 97%, or 100% sequence identity to a region comprising at least 8, 9, 10, 11, 12, 13, 14, 15, 16, 17, 18, 19 or 20 contiguous nucleic acids of a sequence of Table 5A or Table 5B, or a complement thereof.

[0314] In some embodiments, the ASOs disclosed herein target a NSAE pre-mRNA transcribed from a SYNGAP1 genomic sequence. In some embodiments, the ASO targets a NSAE pre-mRNA transcript from a SYNGAP1 genomic sequence comprising a NSAE exon. In some embodiments the NSAE exon is exon 11. In some embodiments, the ASO targets a NSAE pre-mRNA transcript from a SYNGAP1 genomic sequence comprising exon 11. In some embodiments, the ASO targets a NSAE pre-mRNA transcript from a SYNGAP1 genomic sequence comprising an intron flanking the 3′ splice site of the NSAE exon and an intron flanking the 5′ splice site of a NSAE exon. In some embodiments, the intron flanking the 3′ splice site of the NSAE exon is intron 10 and the intron flanking the 5′ splice site of a NSAE exon is intron 11. In some embodiments, the ASO targets a NSAE pre-mRNA transcript from a SYNGAP1 genomic sequence comprising intron 10, exon 11 and intron 11. In some embodiments, the ASO targets a NSAE pre-mRNA transcript comprising a sequence selected from the group consisting of premrna_ENST00000293748.9, premrna_ENST00000418600.7, premrna_ENST00000428982.4, premrna_ENST00000449372.7, premrna_ENST00000470232.1, premrna_ENST00000479510.2, premrna_ENST00000628646.2, premrna_ENST00000629380.3, premrna_ENST00000635885.1, premrna_ENST00000636075.1, premrna_ENST00000636116.1, premrna_ENST00000636146.1, premrna_ENST00000636193.1, premrna_ENST00000636436.1, premrna_ENST00000636443.1, premrna_ENST00000636640.1, premrna_ENST00000636731.1, premrna_ENST00000636905.1, premrna_ENST00000637052.1, premrna_ENST00000637194.1, premrna_ENST00000637490.1, premrna_ENST00000637587.1, premrna_ENST00000637671.1, premrna_ENST00000637721.1, premrna_ENST00000637911.1, premrna_ENST00000638127.1, premrna_ENST00000638142.2, premrna_ENST00000644458.1, premrna_ENST00000645250.1, premrna_ENST00000646630.1. In some embodiments, the ASO targets a NSAE pre-mRNA transcript comprising exon 10 and exon 11. In some embodiments, the ASO targets a SYNGAP1 pre-mRNA sequence comprising a NSAE exon. In some embodiments, the ASO targets a SYNGAP1 pre-mRNA sequence comprising exon 11. In some embodiments, the ASO targets a SYNGAP1 pre-mRNA sequence comprising an intron flanking the 3′ splice site of the NSAE exon. In some embodiments, the ASO targets a SYNGAP1 pre-mRNA sequence comprising intron 10. In some embodiments, the ASO targets a SYNGAP1 pre-mRNA sequence comprising an intron flanking the 5′ splice site of the NSAE exon. In some embodiments, the transcript is selected from the group consisting of transcript_ENST00000293748.9, transcript_ENST00000418600.7, transcript_ENST00000428982.4, transcript_ENST00000449372.7, transcript_ENST00000470232.1, transcript_ENST00000479510.2, transcript_ENST00000628646.2, transcript_ENST00000629380.3, transcript_ENST00000635885.1, transcript_ENST00000636075.1, transcript_ENST00000636116.1, transcript_ENST00000636146.1, transcript_ENST00000636193.1, transcript_ENST00000636436.1, transcript_ENST00000636443.1, transcript_ENST00000636640.1, transcript_ENST00000636731.1, transcript_ENST00000636905.1, transcript_ENST00000637052.1, transcript_ENST00000637194.1, transcript_ENST00000637490.1, transcript_ENST00000637587.1, transcript_ENST00000637671.1, transcript_ENST00000637721.1, transcript_ENST00000637911.1, transcript_ENST00000638127.1, transcript_ENST00000638142.2, transcript_ENST00000644458.1, transcript_ENST00000645250.1 and transcript_ENST00000646630.1.

[0315] In some embodiments, the SYNGAP1 pre-mRNA transcript is encoded by a genetic sequence with at least about 80%, 85%, 90%, 95%, 96%, 97%, 98%, 99% or 100% sequence identity to the Ensembl reference number ENSG00000227460.8 or ENSG00000197283.17 or a complement thereof. In some embodiments, the SYNGAP1 pre-mRNA transcript comprises a sequence with at least about 80%, 85%, 90%, 95%, 96%, 97%, 98%, 99% or 100% sequence identity to a SYNGAP1 pre-mRNA transcript or a complement thereof described herein.

[0316] In some embodiments, the targeted portion of the SYNGAP1 pre-mRNA comprises a sequence with at least 80%, 85%, 90%, 95%, 97%, or 100% sequence identity to a region comprising at least 8 contiguous nucleic acids of a sequence of premrna_ENST00000293748.9, premrna_ENST00000418600.7, premrna_ENST00000428982.4, premrna_ENST00000449372.7, premrna_ENST00000470232.1, premrna_ENST00000479510.2, premrna_ENST00000628646.2, premrna_ENST00000629380.3, premrna_ENST00000635885.1, premrna_ENST00000636075.1, premrna_ENST00000636116.1, premrna_ENST00000636146.1, premrna_ENST00000636193.1, premrna_ENST00000636436.1, premrna_ENST00000636443.1, premrna_ENST00000636640.1, premrna_ENST00000636731.1, premrna_ENST00000636905.1, premrna_ENST00000637052.1, premrna_ENST00000637194.1, premrna_ENST00000637490.1, premrna_ENST00000637587.1, premrna_ENST00000637671.1, premrna_ENST00000637721.1, premrna_ENST00000637911.1, premrna_ENST00000638127.1, premrna_ENST00000638142.2, premrna_ENST00000644458.1, premrna_ENST00000645250.1, premrna_ENST00000646630.1 or a sequence of Table 3 or complements thereof. In some embodiments, the targeted portion of the SYNGAP1 pre-mRNA comprises a sequence with at least 80%, 85%, 90%, 95%, 97%, or 100% sequence identity to a region comprising at least 8 contiguous nucleic acids of a sequence selected from the group consisting of the sequences of Table 3 or Table 6 or complements thereof. In some embodiments, the ASO comprises a sequence that is at least about 80%, 85%, 90%, 95%, 97%, or 100% identical to any one the sequences of Table 1 or complements thereof.

[0317] In some embodiments, the ASOs disclosed herein target a NSAE pre-mRNA transcribed from a target genomic sequence. In some embodiments, the ASO targets a NSAE pre-mRNA transcript from a target genomic sequence comprising a NSAE exon. In some embodiments, the ASO targets a NSAE pre-mRNA transcript from a target genomic sequence comprising an intron flanking the 3′ splice site of the NSAE exon and an intron flanking the 5′ splice site of a NSAE exon. In some embodiments, the ASO targets a NSAE pre-mRNA transcript comprising a sequence selected from the pre-mRNA transcript sequences of Table 6. In some embodiments, the ASO targets a NSAE pre-mRNA transcript comprising a sequence selected from the pre-mRNA transcript sequences of Table 6 as represented by the Ensembl reference numbers. In some embodiments, the ASO targets a target pre-mRNA sequence comprising a NSAE exon. In some embodiments, the ASO targets a target pre-mRNA sequence comprising an intron flanking the 3′ splice site of the NSAE exon. In some embodiments, the ASO targets a target pre-mRNA sequence comprising an intron flanking the 5′ splice site of the NSAE exon. In some embodiments, the transcript is selected from the group consisting of the transcript sequences of Table 6. In some embodiments, the transcript is selected from the group consisting of the transcript sequences of Table 6 as represented by the Ensembl reference numbers.

[0318] In some embodiments, the target pre-mRNA transcript is encoded by a genetic sequence with at least about 80%, 85%, 90%, 95%, 96%, 97%, 98%, 99% or 100% sequence identity to the gene sequence as represented by the Ensembl reference number or a complement thereof. In some embodiments, the target pre-mRNA transcript comprises a sequence with at least about 80%, 85%, 90%, 95%, 96%, 97%, 98%, 99% or 100% sequence identity to target pre-mRNA transcript or a complement thereof described herein.

[0319] In some embodiments, the targeted portion of the target pre-mRNA comprises a sequence with at least 80%, 85%, 90%, 95%, 97%, or 100% sequence identity to a region comprising at least 8 contiguous nucleic acids of a sequence of Table 4 or a sequence of Table 3 or complements thereof. In some embodiments, the targeted portion of the target pre-mRNA comprises a sequence with at least 80%, 85%, 90%, 95%, 97%, or 100% sequence identity to a region comprising at least 8 contiguous nucleic acids of a sequence of Table 6 as represented by the Ensembl reference numbers or complements thereof. In some embodiments, the targeted portion of the target pre-mRNA comprises a sequence with at least 80%, 85%, 90%, 95%, 97%, or 100% sequence identity to a region comprising at least 8 contiguous nucleic acids of a sequence selected from the group consisting of the sequences of the transcripts of Table 6 or complements thereof. In some embodiments, the targeted portion of the target pre-mRNA comprises a sequence that is complementary to at least 8, 9, 10, 11, 12, 13, 14, 15, 16, 17, 18, 19 or 20 contiguous nucleic acids of a sequence of the transcripts of Table 6 or a complement thereof.

[0320] In some embodiments, the ASO targets exon 11 of a SYNGAP1 pre-mRNA comprising a NSAE exon. In some embodiments, the ASO targets a sequence about 2 nucleotides downstream (or 3′) from the 3′ splice site of exon 11 to about 4 nucleotides upstream (or 5′) from the 5′ splice site of exon 11.

[0321] In some embodiments, the ASO targets an exon of a target pre-mRNA comprising a NSAE exon, wherein the target is SYNGAP1. In some embodiments, the ASO targets a sequence about 2 nucleotides downstream (or 3′) from the 3′ splice site of the exon to about 4 nucleotides upstream (or 5′) from the 5′ splice site of the exon.

[0322] In some embodiments, the ASO targets intron 10 of a SYNGAP1 pre-mRNA comprising a NSAE exon. In some embodiments, the ASO targets a sequence about 4 to about 300 nucleotides upstream (or 5′) from the 3′ splice site of exon 11. In some embodiments, the ASO targets a sequence about 16 to about 100 nucleotides upstream (or 5′) from the 3′ splice site of exon 11. In some embodiments, the ASO targets a sequence about 4 to about 300 nucleotides downstream (or 3′) from the 5′ splice site of exon 10.

[0323] In some embodiments, the ASO has a sequence according to any sequence of Table 1 or complements thereof.

[0324] In some embodiments, the ASO targets an intron of a target pre-mRNA comprising a NSAE exon, wherein the target is SYNGAP1. In some embodiments, the ASO targets a sequence about 4 to about 300 nucleotides upstream (or 5′) from the 3′ splice site of the exon. In some embodiments, the ASO targets a sequence about 16 to about 100 nucleotides upstream (or 5′) from the 3′ splice site of the exon. In some embodiments, the ASO targets a sequence about 4 to about 300 nucleotides downstream (or 3′) from the 5′ splice site of the exon. In some embodiments, the ASO targets intron 10 of a SYNGAP1 pre-mRNA comprising a NSAE exon. In some embodiments, the ASO targets a sequence about 4 to about 300 nucleotides upstream (or 5′) from the 3′ splice site of exon 11. In some embodiments, the ASO targets a sequence about 4 to about 300 nucleotides downstream (or 3′) from the 5′ splice site of intron 10. In some embodiments, the ASO targets a sequence about 6 to about 100 nucleotides downstream (or 5′) from the 5′ splice site of intron 10.

[0325] In some embodiments, the ASO targets an intron of a pre-mRNA comprising a NSAE exon, wherein the target is SYNGAP1. In some embodiments, the ASO targets a sequence about 4 to about 300 nucleotides upstream (or 5′) from the 3′ splice site of the exon. In some embodiments, the ASO targets a sequence about 4 to about 300 nucleotides downstream (or 3′) from the 5′ splice site of the intron. In some embodiments, the ASO targets a sequence about 6 to about 100 nucleotides downstream (or 5′) from the 5′ splice site of the intron.

[0326] In some embodiments, the targeted portion of the SYNGAP1 pre-mRNA is in intron 9, 10, 11 or 12 In some embodiments, the targeted portion of the SYNGAP1 pre-mRNA is in exon 9, 10, 11 or 12. In some embodiments, hybridization of an ASO to the targeted portion of the NSAE pre-mRNA results in inclusion of canonical exon 11, and subsequently increases SYNGAP1 protein production. In some embodiments, hybridization of an ASO to the targeted portion of the NSAE pre-mRNA results in exclusion of a canonical exon, and subsequently decreases SYNGAP1 protein production. In some embodiments, hybridization of an ASO to the targeted portion of the NSAE pre-mRNA results in inclusion or exclusion of a canonical exon, and subsequently modulates SYNGAP1 protein production. In some embodiments, the targeted portion of the SYNGAP1 pre-mRNA is in exon 10 or 11. In some embodiments, the targeted portion of the SYNGAP1 pre-mRNA is in intron 10. In some embodiments, the targeted portion of the SYNGAP1 pre-mRNA is in intron 11.

[0327] In some embodiments, the targeted portion of the target pre-mRNA is in an intron, wherein the target is SYNGAP1. In some embodiments, the targeted portion of the target pre-mRNA is in an exon. In some embodiments, hybridization of an ASO to the targeted portion of the NSAE pre-mRNA results in inclusion of a canonical exon, and subsequently increases target protein production. In some embodiments, hybridization of an ASO to the targeted portion of the NSAE pre-mRNA results in exclusion of a canonical exon, and subsequently decreases target protein production. In some embodiments, hybridization of an ASO to the targeted portion of the NSAE pre-mRNA results in inclusion or exclusion of a canonical exon, and subsequently modulates target protein production.

[0328] In some embodiments, the ASO targets a sequence at most about 1500 nucleotides, about 1000 nucleotides, about 800 nucleotides, about 700 nucleotides, about 600 nucleotides, about 500 nucleotides, about 400 nucleotides, about 300 nucleotides, about 200 nucleotides, about 100 nucleotides, about 80 nucleotides, about 70 nucleotides, about 60 nucleotides, about 50 nucleotides downstream (or 3′) from GRCh38/hg38: chr6 33448868 of SYNGAP1.

[0329] In some embodiments, the ASO targets a sequence upstream from the 5′ end of an NIE. For example, ASOs targeting a sequence upstream from the 5′ end of an NIE comprises a sequence that is at least about 80%, 85%, 90%, 95%, 97%, or 100% complimentary to at least 8 contiguous nucleic acids of any one of the ASOs in Table 2. For example, ASOs targeting a sequence upstream from the 5′ end of an NIE (e.g., exon (GRCh38/hg38: chr6 33448789 33448868) of SYNGAP1) can comprise a sequence with at least 80%, 85%, 90%, 95%, 97%, or 100% sequence identity to any one of the ASOs in Table 2.

[0330] In some embodiments, the ASOs target a sequence containing an exon-intron boundary (or junction). For example, ASOs targeting a sequence containing an exon-intron boundary can comprise a sequence that is at least about 80%, 85%, 90%, 95%, 97%, or 100% complimentary to at least 8 contiguous nucleic acids of any one of the sequences of Table 4 or Table 6. In some embodiments, the ASOs target a sequence downstream from the 3′ end of an NIE. For example, ASOs targeting a sequence downstream from the 3′ end of an NIE can comprise a sequence with at least 80%, 85%, 90%, 95%, 97%, or 100% sequence identity to any one of the ASOs in Table 2. For example, ASOs targeting a sequence downstream from the 3′ end of an NIE (e.g., exon (GRCh38/hg38: chr6 33448789 33448868) of SYNGAP1) can comprise a sequence with at least 80%, 85%, 90%, 95%, 97%, or 100% sequence identity to any one of the ASOs in Table 2. In some embodiments, ASOs target a sequence within an NIE.

[0331] In some embodiments, the targeted portion of the SYNGAP1 NIE containing pre-mRNA is intron (GRCh38/hg38: chr6 33447934 33451759) of SYNGAP1.

[0332] In some embodiments, the methods and compositions of the present disclosure are used to increase the expression of SYNGAP1 by inducing exon skipping of a pseudo-exon of a SYNGAP1 NIE containing pre-mRNA. In some embodiments, the pseudo-exon can be any SYNGAP1 intron or a portion thereof. In some embodiments, the pseudo-exon is within intron (GRCh38/hg38: chr6 33447934 33451759) of SYNGAP1.

[0333] In some embodiments, the methods described herein are used to increase the production of a functional SYNGAP1 protein or RNA. As used herein, the term “functional” refers to the amount of activity or function of a SYNGAP1 protein or RNA that is necessary to eliminate any one or more symptoms of a treated condition or disease, e.g., mental retardation, autosomal dominant 5. In some embodiments, the methods are used to increase the production of a partially functional SYNGAP1 protein or RNA. As used herein, the term “partially functional” refers to any amount of activity or function of the SYNGAP1 protein or RNA that is less than the amount of activity or function that is necessary to eliminate or prevent any one or more symptoms of a disease or condition. In some embodiments, a partially functional protein or RNA will have at least 10%, at least 20%, at least 30%, at least 40%, at least 50%, at least 60%, at least 70%, at least 75%, at least 80%, at least 85%, at least 90%, or at least 95% less activity relative to the fully functional protein or RNA.

[0334] In some embodiments, the method is a method of increasing the expression of the SYNGAP1 protein by cells of a subject having a NIE containing pre-mRNA encoding the SYNGAP1 protein, wherein the subject has Mental retardation, autosomal dominant 5 caused by a deficient amount of activity of SYNGAP1 protein, and wherein the deficient amount of the SYNGAP1 protein is caused by haploinsufficiency of the SYNGAP1 protein. In such an embodiment, the subject has a first allele encoding a functional SYNGAP1 protein, and a second allele from which the SYNGAP1 protein is not produced. In another such embodiment, the subject has a first allele encoding a functional SYNGAP1 protein, and a second allele encoding a nonfunctional SYNGAP1 protein. In another such embodiment, the subject has a first allele encoding a functional SYNGAP1 protein, and a second allele encoding a partially functional SYNGAP1 protein. In any of these embodiments, the antisense oligomer binds to a targeted portion of the NIE containing pre-mRNA transcribed from the second allele, thereby inducing exon skipping of the pseudo-exon from the pre-mRNA, and causing an increase in the level of mature mRNA encoding functional SYNGAP1 protein, and an increase in the expression of the SYNGAP1 protein in the cells of the subject.

[0335] In some embodiments, the method is a method of increasing the expression of the SYNGAP1 protein by cells of a subject having a NIE containing pre-mRNA encoding the SYNGAP1 protein, wherein the subject has Mental retardation, autosomal dominant 5 caused by a deficient amount of activity of SYNGAP1 protein, and wherein the deficient amount of the SYNGAP1 protein is caused by autosomal recessive inheritance.

[0336] In some embodiments, the method is a method of increasing the expression of the SYNGAP1 protein by cells of a subject having a NIE containing pre-mRNA encoding the SYNGAP1 protein, wherein the subject has Mental retardation, autosomal dominant 5 caused by a deficient amount of activity of SYNGAP1 protein, and wherein the deficient amount of the SYNGAP1 protein is caused by autosomal dominant inheritance.

[0337] In some embodiments, the method is a method of increasing the expression of the SYNGAP1 protein by cells of a subject having a NIE containing pre-mRNA encoding the SYNGAP1 protein, wherein the subject has Mental retardation, autosomal dominant 5 caused by a deficient amount of activity of SYNGAP1 protein, and wherein the deficient amount of the SYNGAP1 protein is caused by X-linked dominant inheritance.

[0338] In related embodiments, the method is a method of using an ASO to increase the expression of a protein or functional RNA. In some embodiments, an ASO may be used to increase the expression of SYNGAP1 protein in cells of a subject having a NIE containing pre-mRNA encoding SYNGAP1 protein, wherein the subject has a deficiency, e.g., Mental retardation, autosomal dominant 5, in the amount or function of a SYNGAP1 protein.

[0339] In various embodiments, the present disclosure provides a therapeutic agent which can target SYNGAP1 mRNA transcripts to modulate splicing or protein expression level. The therapeutic agent can be a small molecule, polynucleotide, or polypeptide. In some embodiments, the therapeutic agent is an ASO. Various regions or sequences on the SYNGAP1 pre-mRNA can be targeted by a therapeutic agent, such as an ASO. In some embodiments, the ASO targets a SYNGAP1 pre-mRNA transcript containing an NIE. In some embodiments, the ASO targets a sequence within an NIE of a SYNGAP1 pre-mRNA transcript. In some embodiments, the ASO targets a sequence upstream (or 5′) from the 5′ end of an NIE (3′ss) of a SYNGAP1 pre-mRNA transcript. In some embodiments, the ASO targets a sequence downstream (or 3′) from the 3′ end of an NIE (5′ss) of a SYNGAP1 pre-mRNA transcript. In some embodiments, the ASO targets a sequence that is within an intron flanking on the 5′ end of the NIE of a SYNGAP1 pre-mRNA transcript. In some embodiments, the ASO targets a sequence that is within an intron flanking the 3′ end of the NIE of a SYNGAP1 pre-mRNA transcript. In some embodiments, the ASO targets a sequence comprising an NIE-intron boundary of a SYNGAP1 pre-mRNA transcript. An NIE-intron boundary can refer to the junction of an intron sequence and an NIE region. The intron sequence can flank the 5′ end of the NIE, or the 3′ end of the NIE. In some embodiments, the ASO targets a sequence within an exon of a SYNGAP1 pre-mRNA transcript. In some embodiments, the ASO targets a sequence within an intron of a SYNGAP1 pre-mRNA transcript. In some embodiments, the ASO targets a sequence comprising both a portion of an intron and a portion of an exon of a SYNGAP1 pre-mRNA transcript.

[0340] In some embodiments, the ASO targets a sequence about 4 to about 300 nucleotides upstream (or 5′) from the 5′ end of the NIE. In some embodiments, the ASO targets a sequence about 1 to about 20 nucleotides, about 20 to about 50 nucleotides, about 50 to about 100 nucleotides, about 100 to about 150 nucleotides, about 150 to about 200 nucleotides, about 200 to about 250 nucleotides, or about 250 to about 300 nucleotides upstream (or 5′) from the 5′ end of the NIE region. In some embodiments, the ASO may target a sequence more than 300 nucleotides upstream from the 5′ end of the NIE. In some embodiments, the ASO targets a sequence about 4 to about 300 nucleotides downstream (or 3′) from the 3′ end of the NIE. In some embodiments, the ASO targets a sequence about 1 to about 20 nucleotides, about 20 to about 50 nucleotides, about 50 to about 100 nucleotides, about 100 to about 150 nucleotides, about 150 to about 200 nucleotides, about 200 to about 250 nucleotides, or about 250 to about 300 nucleotides downstream from the 3′ end of the NIE. In some embodiments, the ASO targets a sequence more than 300 nucleotides downstream from the 3′ end of the NIE.

[0341] In some embodiments, the SYNGAP1 NIE containing pre-mRNA transcript is encoded by a genetic sequence with at least about 80%, 85%, 90%, 95%, 96%, 97%, 98%, 99% or 100% sequence identity to a SYNGAP gene. In some embodiments, the SYNGAP1 NIE pre-mRNA transcript comprises a sequence with at least about 80%, 85%, 90%, 95%, 96%, 97%, 98%, 99% or 100% sequence identity to any one of the sequences of the transcripts of Table 6.

[0342] In some embodiments, SYNGAP1 NIE containing pre-mRNA transcript (or NMD exon mRNA) is encoded by a sequence with at least about 80%, 85%, 90%, 95%, 97%, or 100% sequence identity to any one of the sequences of the transcripts of Table 6. In some embodiments, the targeted portion of the NMD exon mRNA comprises a sequence with at least 80%, 85%, 90%, 95%, 97%, or 100% sequence identity to a region comprising at least 8 contiguous nucleic acids of any one of the sequences of the transcripts of Table 4. In some embodiments, the targeted portion of the NMD exon mRNA comprises a sequence with at least 80%, 85%, 90%, 95%, 97%, or 100% sequence identity to a region comprising at least 8 contiguous nucleic acids of any one of the sequences of the transcripts of Table 4.

### SYNGAP1 Protein

[0343] In some embodiments, a mutation occurs in both alleles. In some embodiments, a mutation occurs in one of the two alleles. In some embodiments, additional mutation occurs in one of the two alleles. In some embodiments, the additional mutation occurs in the same allele as the first mutation. In other embodiments, the additional mutation occurs is a trans mutation.

[0344] In some embodiments, the methods described herein are used to increase the production of a functional SYNGAP1 protein. In some embodiments, the methods described herein are used to decrease the production of a functional SYNGAP1 protein. In some embodiments, the methods described herein are used to modulate the production of a functional SYNGAP1 protein. As used herein, the term “functional” refers to the amount of activity or function of a SYNGAP1 protein that is necessary to prevent or eliminate any one or more symptoms of a treated disease or condition, e.g., autosomal dominant mental retardation. Alternatively, overexpression of a functional SYNGAP1 protein may induce or increase any one or more symptoms of a treated disease or condition. In some embodiments, the methods are used to increase the production of a partially functional SYNGAP1 protein. In some embodiments, the methods are used to decrease the production of a partially functional SYNGAP1 protein. In some embodiments, the methods are used to modulate the production of a partially functional SYNGAP1 protein. As used herein, the term “partially functional” refers to any amount of activity or function of the SYNGAP1 protein that is less than the amount of activity or function that is necessary to eliminate or prevent any one or more symptoms of a disease or condition, e.g., autosomal dominant mental retardation. Alternatively, expression or overexpression of a functional SYNGAP1 protein may induce or increase any one or more symptoms of a treated disease or condition. In some embodiments, a partially functional protein or RNA will have at least 10%, at least 20%, at least 30%, at least 40%, at least 50%, at least 60%, at least 70%, at least 75%, at least 80%, at least 85%, at least 90%, or at least 95% less activity relative to the fully functional protein or RNA.

[0345] In some embodiments, the method is a method of increasing the expression of the SYNGAP1 protein by cells of a subject having a NSAE pre-mRNA encoding the SYNGAP1 protein, wherein the subject has autosomal dominant mental retardation caused by a deficient amount of activity of SYNGAP1 protein, and wherein the deficient amount of the SYNGAP1 protein is caused by sporadic mutation. In such an embodiment, the subject has a first allele carrying the mutation and a second allele from which the SYNGAP1 protein is not produced. In another such embodiment, the subject has a first allele carrying a mutation and a second allele encoding a nonfunctional SYNGAP1 protein. In another such embodiment, the subject has a first allele carrying a mutation and a second allele encoding a partially functional SYNGAP1 protein. In another such an embodiment, the subject has a first allele carrying a mutation and a second allele carrying the mutation. In any of these embodiments, the antisense oligomer binds to a targeted portion of the NSAE pre-mRNA transcribed from the allele carrying a mutation, thereby prevent alternate splicing of NSAEs into the pre-mRNA, and causing an increase in the level of mature mRNA encoding functional SYNGAP1 protein, and an increase in the expression of the SYNGAP1 protein in the cells of the subject.

[0346] In related embodiments, the method is a method of using an ASO to increase the expression of a functional protein or functional RNA. In some embodiments, an ASO is used to increase the expression of SYNGAP1 protein in cells of a subject having a NSAE pre-mRNA encoding SYNGAP1 protein, wherein the subject has a deficiency, e.g., autosomal dominant mental retardation, in the amount or function of SYNGAP1 protein.

[0347] In some embodiments, the method is a method of decreasing the expression of the SYNGAP1 protein by cells of a subject having a NSAE pre-mRNA encoding the SYNGAP1 protein, wherein the subject has a disease caused by an excess amount of activity of SYNGAP1 protein, and wherein the excess amount of SYNGAP1 protein is caused by a mutation. In some embodiments, the antisense oligomer binds to a targeted portion of the NSAE pre-mRNA transcribed from the allele carrying a mutation, thereby increasing alternate splicing of NSAEs into the pre-mRNA, and causing a decrease in the level of mature mRNA encoding functional SYNGAP1 protein, and an decrease in the expression of the SYNGAP1 protein in the cells of the subject. In related embodiments, the method is a method of using an ASO to decrease the expression of a functional protein or functional RNA. In some embodiments, an ASO is used to decrease the expression of SYNGAP1 protein in cells of a subject having a NSAE pre-mRNA encoding the SYNGAP1 protein, wherein the subject has an excess in the amount or function of SYNGAP1 protein.

[0348] In some embodiments, the method is a method of modulating the expression of the SYNGAP1 protein by cells of a subject having a NSAE pre-mRNA encoding the SYNGAP1 protein, wherein the subject has a disease caused by a deficient or excess amount of activity of SYNGAP1 protein, and wherein the deficient or excess amount of the SYNGAP1 protein is caused by a mutation. In some embodiments, the antisense oligomer binds to a targeted portion of the NSAE pre-mRNA transcribed from the allele carrying a mutation, thereby modulating alternate splicing of NSAEs into the pre-mRNA, and causing a modulation in the level of mature mRNA encoding functional SYNGAP1 protein, and a modulation in the expression of SYNGAP1 protein in the cells of the subject. In related embodiments, the method is a method of using an ASO to modulate the expression of a functional protein or functional RNA. In some embodiments, an ASO is used to modulate the expression of SYNGAP1 protein in cells of a subject having a NSAE pre-mRNA encoding the SYNGAP1 protein, wherein the subject has an abnormality in the amount or function of the SYNGAP1 protein.

[0349] In some embodiments, the NSAE pre-mRNA transcript that encodes the protein that is causative of the disease or condition is targeted by the ASOs described herein. In some embodiments, a NSAE pre-mRNA transcript that encodes a protein that is not causative of the disease is targeted by the ASOs. For example, a disease that is the result of a mutation or deficiency of a first protein in a particular pathway may be ameliorated by targeting a NSAE containing pre-mRNA that encodes a second protein, thereby increasing production of the second protein. In some embodiments, the function of the second protein is able to compensate for the mutation or deficiency of the first protein (which is causative of the disease or condition).

[0350] In some embodiments, the subject has:
[0351] (a) a first mutant allele carrying a mutation from which the SYNGAP1 protein is produced at a reduced level compared to production from a wild-type allele, and
[0352] (b) a second mutant allele from which
   [0353] (i) the SYNGAP1 protein is produced at a reduced level compared to production from a wild-type allele due to the mutation,
   [0354] (ii) the SYNGAP1 protein is produced at a reduced level compared to production from a wild-type allele,
   [0355] (iii) the SYNGAP1 protein is produced in a form having reduced function compared to an equivalent wild-type protein, or
   [0356] (iv) the SYNGAP1 protein is not produced, and
[0357] wherein the NSAE pre-mRNA is transcribed from the first allele and/or the second allele carrying the mutation. In these embodiments, the ASO binds to a targeted portion of the NSAE pre-mRNA transcribed from the first allele or the second allele, thereby promoting exon inclusion from the NSAE pre-mRNA, and causing an increase in the level of full-length mRNA encoding SYNGAP1 protein and an increase in the expression of the target protein or functional RNA in the cells of the subject. In these embodiments, the target protein or functional RNA having an increase in expression level resulting from exon inclusion from the NSAE pre-mRNA has full function compared to the equivalent wild-type protein (fully-functional). In these embodiments, the ASO binds to a targeted portion of the NSAE pre-mRNA transcribed from the first allele or the second allele, thereby reducing exon inclusion from the NSAE pre-mRNA, and causing a decrease in the level of full-length mRNA encoding SYNGAP1 protein and a decrease in the expression of the target protein or functional RNA in the cells of the subject. In these embodiments, the target protein or functional RNA having a decrease in expression level resulting from exon exclusion from the NSAE pre-mRNA has full function compared to the equivalent wild-type protein (fully-functional).

[0358] In some embodiments, contacting cells with an ASO that is complementary to a targeted portion of a SYNGAP1 pre-mRNA transcript results in an increase in the amount of SYNGAP1 protein produced by at least 10, 20, 30, 40, 50, 60, 80, 100, 150, 200, 250, 300, 350, 400, 450, 500, or 1000%, compared to the amount of the protein produced by a cell in the absence of the ASO/absence of treatment. In some embodiments, the total amount of SYNGAP1 protein produced by the cell to which the antisense oligomer is contacted is increased about 20% to about 300%, about 50% to about 300%, about 100% to about 300%, about 150% to about 300%, about 20% to about 50%, about 20% to about 100%, about 20% to about 150%, about 20% to about 200%, about 20% to about 250%, about 50% to about 100%, about 50% to about 150%, about 50% to about 200%, about 50% to about 250%, about 100% to about 150%, about 100% to about 200%, about 100% to about 250%, about 150% to about 200%, about 150% to about 250%, about 200% to about 250%, at least about 10%, at least about 20%, at least about 50%, at least about 100%, at least about 150%, at least about 200%, at least about 250%, or at least about 300%, compared to the amount of target protein produced by a control compound. In some embodiments, the total amount of SYNGAP1 protein produced by the cell to which the antisense oligomer is contacted is increased about 1.1 to about 10-fold, about 1.5 to about 10-fold, about 2 to about 10-fold, about 3 to about 10-fold, about 4 to about 10-fold, about 1.1 to about 5-fold, about 1.1 to about 6-fold, about 1.1 to about 7-fold, about 1.1 to about 8-fold, about 1.1 to about 9-fold, about 2 to about 5-fold, about 2 to about 6-fold, about 2 to about 7-fold, about 2 to about 8-fold, about 2 to about 9-fold, about 3 to about 6-fold, about 3 to about 7-fold, about 3 to about 8-fold, about 3 to about 9-fold, about 4 to about 7-fold, about 4 to about 8-fold, about 4 to about 9-fold, at least about 1.1-fold, at least about 1.5-fold, at least about 2-fold, at least about 2.5-fold, at least about 3-fold, at least about 3.5-fold, at least about 4-fold, at least about 5-fold, or at least about 10-fold, compared to the amount of target protein produced by a control compound. A control compound can be, for example, an oligonucleotide that is not complementary to a targeted portion of the pre-mRNA.

[0359] In some embodiments, the level of mRNA encoding SYNGAP1 protein is increased 1.1 to 10-fold, when compared to the amount of mRNA encoding SYNGAP1 protein that is produced in a control cell, e.g., one that is not treated with the antisense oligomer or one that is treated with an antisense oligomer that does not bind to the targeted portion of the SYNGAP1 containing pre-mRNA.

[0360] In some embodiments, the level of mRNA encoding SYNGAP1 protein is increased 1.1 to 10-fold, when compared to the amount of mRNA encoding SYNGAP1 protein that is produced in a control cell, e.g., one that is not treated with the antisense oligomer or one that is treated with an antisense oligomer that does not bind to the targeted portion of the SYNGAP1 pre-mRNA.

[0361] In some embodiments of the present invention, a subject can have a mutation in SYNGAP1. A variety of pathogenic variants have been reported to cause SYNGAP1 deficiency, including missense variants, nonsense variants, single- and double-nucleotide insertions and deletions, complex insertion/deletions, and splice site variants. In the presence of this pathogenic variant approximately 2%-5% of transcripts are correctly spliced, allowing for residual enzyme activity. In some embodiments, disease results from loss of function of SYNGAP1 caused by SYNGAP1 pathogenic variants that generate truncated proteins or proteins with altered conformations or reduced activity.

[0362] In some embodiments, a subject having any SYNGAP1 mutation known in the art and described as above can be treated using the methods and compositions described herein. In some embodiments, the mutation is within any SYNGAP1 intron or exon. In some embodiments, the mutation is within SYNGAP1 exon 10 or 11.

[0363] In some embodiments, contacting cells with an ASO that is complementary to a targeted portion of a SYNGAP1 pre-mRNA transcript results in a decrease in the amount of SYNGAP1 protein produced by at least 10, 20, 30, 40, 50, 60, 80, 100, 150, 200, 250, 300, 350, 400, 450, 500, or 1000%, compared to the amount of the protein produced by a cell in the absence of the ASO/absence of treatment. In some embodiments, the total amount of SYNGAP1 protein produced by the cell to which the antisense oligomer is contacted is decreased about 20% to about 300%, about 50% to about 300%, about 100% to about 300%, about 150% to about 300%, about 20% to about 50%, about 20% to about 100%, about 20% to about 150%, about 20% to about 200%, about 20% to about 250%, about 50% to about 100%, about 50% to about 150%, about 50% to about 200%, about 50% to about 250%, about 100% to about 150%, about 100% to about 200%, about 100% to about 250%, about 150% to about 200%, about 150% to about 250%, about 200% to about 250%, at least about 10%, at least about 20%, at least about 50%, at least about 100%, at least about 150%, at least about 200%, at least about 250%, or at least about 300%, compared to the amount of target protein produced by a control compound. In some embodiments, the total amount of SYNGAP1 protein produced by the cell to which the antisense oligomer is contacted is decreased about 1.1 to about 10-fold, about 1.5 to about 10-fold, about 2 to about 10-fold, about 3 to about 10-fold, about 4 to about 10-fold, about 1.1 to about 5-fold, about 1.1 to about 6-fold, about 1.1 to about 7-fold, about 1.1 to about 8-fold, about 1.1 to about 9-fold, about 2 to about 5-fold, about 2 to about 6-fold, about 2 to about 7-fold, about 2 to about 8-fold, about 2 to about 9-fold, about 3 to about 6-fold, about 3 to about 7-fold, about 3 to about 8-fold, about 3 to about 9-fold, about 4 to about 7-fold, about 4 to about 8-fold, about 4 to about 9-fold, at least about 1.1-fold, at least about 1.5-fold, at least about 2-fold, at least about 2.5-fold, at least about 3-fold, at least about 3.5-fold, at least about 4-fold, at least about 5-fold, or at least about 10-fold, compared to the amount of target protein produced by a control compound. A control compound can be, for example, an oligonucleotide that is not complementary to a targeted portion of the pre-mRNA.

[0364] In some embodiments, the level of mRNA encoding SYNGAP1 protein is decreased 1.1 to 10-fold, when compared to the amount of mRNA encoding SYNGAP1 protein that is produced in a control cell, e.g., one that is not treated with the antisense oligomer or one that is treated with an antisense oligomer that does not bind to the targeted portion of the SYNGAP1 containing pre-mRNA.

[0365] In some embodiments, the level of mRNA encoding SYNGAP1 protein is decreased 1.1 to 10-fold, when compared to the amount of mRNA encoding SYNGAP1 protein that is produced in a control cell, e.g., one that is not treated with the antisense oligomer or one that is treated with an antisense oligomer that does not bind to the targeted portion of the SYNGAP1 pre-mRNA.

[0366] In some embodiments of the present invention, a subject can have a mutation in SYNGAP1. A variety of pathogenic variants may cause SYNGAP1 overexpression, including missense variants, nonsense variants, single- and double-nucleotide insertions and deletions, complex insertion/deletions, and splice site variants. In some embodiments, disease results from an overexpression of function of SYNGAP1 caused by SYNGAP1 pathogenic variants that generate truncated proteins or proteins with altered conformations or increased activity.

[0367] In some embodiments, a subject having any SYNGAP1 mutation known in the art and described as above can be treated using the methods and compositions described herein. In some embodiments, the mutation is within any SYNGAP1 intron or exon. In some embodiments, the mutation is within SYNGAP1 exon 10 or 11.

### Target Protein

[0368] In some embodiments, a mutation occurs in both alleles. In some embodiments, a mutation occurs in one of the two alleles, wherein the target is SYNGAP1. In some embodiments, additional mutation occurs in one of the two alleles. In some embodiments, the additional mutation occurs in the same allele as the first mutation. In other embodiments, the additional mutation occurs is a trans mutation.

[0369] In some embodiments, the methods described herein are used to increase the production of a functional target protein, wherein the target is SYNGAP1. In some embodiments, the methods described herein are used to decrease the production of a functional target protein. In some embodiments, the methods described herein are used to modulate the production of a functional target protein. As used herein, the term “functional” refers to the amount of activity or function of a target protein that is necessary to prevent or eliminate any one or more symptoms of a treated disease or condition, e.g., autosomal dominant mental retardation. Alternatively, overexpression of a functional target protein may induce or increase any one or more symptoms of a treated disease or condition. In some embodiments, the methods are used to increase the production of a partially functional target protein. In some embodiments, the methods are used to decrease the production of a partially functional target protein. In some embodiments, the methods are used to modulate the production of a partially functional target protein. As used herein, the term “partially functional” refers to any amount of activity or function of the target protein that is less than the amount of activity or function that is necessary to eliminate or prevent any one or more symptoms of a disease or condition, e.g., autosomal dominant mental retardation. Alternatively, expression or overexpression of a functional target protein may induce or increase any one or more symptoms of a treated disease or condition. In some embodiments, a partially functional protein or RNA will have at least 10%, at least 20%, at least 30%, at least 40%, at least 50%, at least 60%, at least 70%, at least 75%, at least 80%, at least 85%, at least 90%, or at least 95% less activity relative to the fully functional protein or RNA.

[0370] In some embodiments, the method is a method of increasing the expression of the target protein by cells of a subject having a NSAE pre-mRNA encoding the target protein, wherein the subject has autosomal dominant mental retardation caused by a deficient amount of activity of target protein, wherein the deficient amount of the target protein is caused by sporadic mutation, and wherein the target is SYNGAP1. In such an embodiment, the subject has a first allele carrying a mutation and a second allele from which the target protein is not produced. In another such embodiment, the subject has a first allele carrying a mutation and a second allele encoding a nonfunctional target protein. In another such embodiment, the subject has a first allele carrying a mutation and a second allele encoding a partially functional target protein. In another such an embodiment, the subject has a first allele carrying a mutation and a second allele carrying the mutation. In any of these embodiments, the antisense oligomer binds to a targeted portion of the NSAE pre-mRNA transcribed from the allele carrying a mutation, thereby prevent alternate splicing of NSAEs into the pre-mRNA, and causing an increase in the level of mature mRNA encoding functional target protein, and an increase in the expression of the target protein in the cells of the subject. In related embodiments, the method is a method of using an ASO to increase the expression of a functional protein or functional RNA. In some embodiments, an ASO is used to increase the expression of target protein in cells of a subject having a NSAE pre-mRNA encoding the target protein, wherein the subject has a deficiency, e.g., autosomal dominant mental retardation, in the amount or function of the target protein.

[0371] In some embodiments, the method is a method of decreasing the expression of the target protein by cells of a subject having a NSAE pre-mRNA encoding the target protein, wherein the subject has a disease caused by an excess amount of activity of the target protein, wherein the excess amount of the target protein is caused by a mutation, and wherein the target is SYNGAP1. In some embodiments, the antisense oligomer binds to a targeted portion of the NSAE pre-mRNA transcribed from the allele carrying a mutation, thereby increasing alternate splicing of NSAEs into the pre-mRNA, and causing a decrease in the level of mature mRNA encoding the functional target protein, and a decrease in the expression of the target protein in the cells of the subject. In related embodiments, the method is a method of using an ASO to decrease the expression of a functional protein or functional RNA. In some embodiments, an ASO is used to decrease the expression of the target protein in cells of a subject having a NSAE pre-mRNA encoding the target protein, wherein the subject has an excess in the amount or function of the target protein.

[0372] In some embodiments, the method is a method of modulating the expression of the target protein by cells of a subject having a NSAE pre-mRNA encoding the target protein, wherein the subject has a disease caused by a deficient or excess amount of activity of the target protein, wherein the deficient or excess amount of the target protein is caused by a mutation, and wherein the target is SYNGAP1. In some embodiments, the antisense oligomer binds to a targeted portion of the NSAE pre-mRNA transcribed from the allele carrying a mutation, thereby modulating alternate splicing of NSAEs into the pre-mRNA, and causing a modulation in the level of mature mRNA encoding the functional target protein, and a modulation in the expression of the target protein in the cells of the subject. In related embodiments, the method is a method of using an ASO to modulate the expression of a functional protein or functional RNA. In some embodiments, an ASO is used to modulate the expression of the target protein in cells of a subject having a NSAE pre-mRNA encoding the target protein, wherein the subject has an abnormality in the amount or function of the target protein.

[0373] In some embodiments, the NSAE pre-mRNA transcript that encodes the protein that is causative of the disease or condition is targeted by the ASOs described herein. In some embodiments, a NSAE pre-mRNA transcript that encodes a protein that is not causative of the disease is targeted by the ASOs. For example, a disease that is the result of a mutation or deficiency of a first protein in a particular pathway may be ameliorated by targeting a NSAE containing pre-mRNA that encodes a second protein, thereby increasing production of the second protein. In some embodiments, the function of the second protein is able to compensate for the mutation or deficiency of the first protein (which is causative of the disease or condition).

[0374] In some embodiments, the subject has:
[0375] (a) a first mutant allele carrying a mutation from which the target protein is produced at a reduced level compared to production from a wild-type allele, and
[0376] (b) a second mutant allele from which
   [0377] (i) the target protein is produced at a reduced level compared to production from a wild-type allele due to the mutation,
   [0378] (ii) the target protein is produced at a reduced level compared to production from a wild-type allele,
   [0379] (iii) the target protein is produced in a form having reduced function compared to an equivalent wild-type protein, or
   [0380] (iv) the target protein is not produced, and
[0381] wherein the NSAE pre-mRNA is transcribed from the first allele and/or the second allele carrying the mutation and wherein the target is SYNGAP1. In these embodiments, the ASO binds to a targeted portion of the NSAE pre-mRNA transcribed from the first allele or the second allele, thereby promoting exon inclusion from the NSAE pre-mRNA, and causing an increase in the level of full-length mRNA encoding the target protein and an increase in the expression of the target protein or functional RNA in the cells of the subject. In these embodiments, the target protein or functional RNA having an increase in expression level resulting from exon inclusion from the NSAE pre-mRNA has full function compared to the equivalent wild-type protein (fully-functional). In these embodiments, the ASO binds to a targeted portion of the NSAE pre-mRNA transcribed from the first allele or the second allele, thereby reducing exon inclusion from the NSAE pre-mRNA, and causing a decrease in the level of full-length mRNA encoding the target protein and a decrease in the expression of the target protein or functional RNA in the cells of the subject. In these embodiments, the target protein or functional RNA having a decrease in expression level resulting from exon exclusion from the NSAE pre-mRNA has full function compared to the equivalent wild-type protein (fully-functional).

[0382] In some embodiments, contacting cells with an ASO that is complementary to a targeted portion of a target pre-mRNA transcript results in an increase in the amount of the target protein produced by at least 10, 20, 30, 40, 50, 60, 80, 100, 150, 200, 250, 300, 350, 400, 450, 500, or 1000%, compared to the amount of the protein produced by a cell in the absence of the ASO/absence of treatment, wherein the target is SYNGAP1. In some embodiments, the total amount of the target protein produced by the cell to which the antisense oligomer is contacted is increased about 20% to about 300%, about 50% to about 300%, about 100% to about 300%, about 150% to about 300%, about 20% to about 50%, about 20% to about 100%, about 20% to about 150%, about 20% to about 200%, about 20% to about 250%, about 50% to about 100%, about 50% to about 150%, about 50% to about 200%, about 50% to about 250%, about 100% to about 150%, about 100% to about 200%, about 100% to about 250%, about 150% to about 200%, about 150% to about 250%, about 200% to about 250%, at least about 10%, at least about 20%, at least about 50%, at least about 100%, at least about 150%, at least about 200%, at least about 250%, or at least about 300%, compared to the amount of target protein produced by a control compound. In some embodiments, the total amount of the target protein produced by the cell to which the antisense oligomer is contacted is increased about 1.1 to about 10-fold, about 1.5 to about 10-fold, about 2 to about 10-fold, about 3 to about 10-fold, about 4 to about 10-fold, about 1.1 to about 5-fold, about 1.1 to about 6-fold, about 1.1 to about 7-fold, about 1.1 to about 8-fold, about 1.1 to about 9-fold, about 2 to about 5-fold, about 2 to about 6-fold, about 2 to about 7-fold, about 2 to about 8-fold, about 2 to about 9-fold, about 3 to about 6-fold, about 3 to about 7-fold, about 3 to about 8-fold, about 3 to about 9-fold, about 4 to about 7-fold, about 4 to about 8-fold, about 4 to about 9-fold, at least about 1.1-fold, at least about 1.5-fold, at least about 2-fold, at least about 2.5-fold, at least about 3-fold, at least about 3.5-fold, at least about 4-fold, at least about 5-fold, or at least about 10-fold, compared to the amount of target protein produced by a control compound. A control compound can be, for example, an oligonucleotide that is not complementary to a targeted portion of the pre-mRNA.

[0383] In some embodiments, the level of mRNA encoding the target protein is increased 1.1 to 10-fold, when compared to the amount of mRNA encoding the target protein that is produced in a control cell, e.g., one that is not treated with the antisense oligomer or one that is treated with an antisense oligomer that does not bind to the targeted portion of the target containing pre-mRNA, wherein the target is SYNGAP1. In some embodiments, the level of mRNA encoding the target protein is increased 1.1 to 10-fold, when compared to the amount of mRNA encoding the target protein that is produced in a control cell, e.g., one that is not treated with the antisense oligomer or one that is treated with an antisense oligomer that does not bind to the targeted portion of the target pre-mRNA.

[0384] In some embodiments of the present invention, a subject can have a mutation in the target gene, wherein the target is SYNGAP1. A variety of pathogenic variants have been reported to cause the target deficiency, including missense variants, nonsense variants, single- and double-nucleotide insertions and deletions, complex insertion/deletions, and splice site variants. In some embodiments, disease results from loss of function of the target caused by the target pathogenic variants that generate truncated proteins or proteins with altered conformations or reduced activity.

[0385] In some embodiments, a subject having any mutation in the target gene known in the art and described as above can be treated using the methods and compositions described herein, wherein the target is SYNGAP1. In some embodiments, the mutation is within any intron or exon in the target gene.

[0386] In some embodiments, contacting cells with an ASO that is complementary to a targeted portion of a target pre-mRNA transcript results in a decrease in the amount of the target protein produced by at least 10, 20, 30, 40, 50, 60, 80, 100, 150, 200, 250, 300, 350, 400, 450, 500, or 1000%, compared to the amount of the protein produced by a cell in the absence of the ASO/absence of treatment, wherein the target is SYNGAP1. In some embodiments, the total amount of the target protein produced by the cell to which the antisense oligomer is contacted is decreased about 20% to about 300%, about 50% to about 300%, about 100% to about 300%, about 150% to about 300%, about 20% to about 50%, about 20% to about 100%, about 20% to about 150%, about 20% to about 200%, about 20% to about 250%, about 50% to about 100%, about 50% to about 150%, about 50% to about 200%, about 50% to about 250%, about 100% to about 150%, about 100% to about 200%, about 100% to about 250%, about 150% to about 200%, about 150% to about 250%, about 200% to about 250%, at least about 10%, at least about 20%, at least about 50%, at least about 100%, at least about 150%, at least about 200%, at least about 250%, or at least about 300%, compared to the amount of target protein produced by a control compound. In some embodiments, the total amount of the target protein produced by the cell to which the antisense oligomer is contacted is decreased about 1.1 to about 10-fold, about 1.5 to about 10-fold, about 2 to about 10-fold, about 3 to about 10-fold, about 4 to about 10-fold, about 1.1 to about 5-fold, about 1.1 to about 6-fold, about 1.1 to about 7-fold, about 1.1 to about 8-fold, about 1.1 to about 9-fold, about 2 to about 5-fold, about 2 to about 6-fold, about 2 to about 7-fold, about 2 to about 8-fold, about 2 to about 9-fold, about 3 to about 6-fold, about 3 to about 7-fold, about 3 to about 8-fold, about 3 to about 9-fold, about 4 to about 7-fold, about 4 to about 8-fold, about 4 to about 9-fold, at least about 1.1-fold, at least about 1.5-fold, at least about 2-fold, at least about 2.5-fold, at least about 3-fold, at least about 3.5-fold, at least about 4-fold, at least about 5-fold, or at least about 10-fold, compared to the amount of target protein produced by a control compound. A control compound can be, for example, an oligonucleotide that is not complementary to a targeted portion of the pre-mRNA.

[0387] In some embodiments, the level of mRNA encoding the target protein is decreased 1.1 to 10-fold, when compared to the amount of mRNA encoding the target protein that is produced in a control cell, e.g., one that is not treated with the antisense oligomer or one that is treated with an antisense oligomer that does not bind to the targeted portion of the target containing pre-mRNA, wherein the target is SYNGAP1.

[0388] In some embodiments, the level of mRNA encoding the target protein is decreased 1.1 to 10-fold, when compared to the amount of mRNA encoding the target protein that is produced in a control cell, e.g., one that is not treated with the antisense oligomer or one that is treated with an antisense oligomer that does not bind to the targeted portion of the target pre-mRNA, wherein the target is SYNGAP1.

[0389] In some embodiments of the present invention, a subject can have a mutation in the target gene, wherein the target is SYNGAP1. A variety of pathogenic variants may cause the target protein overexpression, including missense variants, nonsense variants, single- and double-nucleotide insertions and deletions, complex insertion/deletions, and splice site variants. In some embodiments, disease results from an overexpression of function of the target protein caused by the pathogenic variants in the target that generate truncated proteins or proteins with altered conformations or increased activity.

[0390] In some embodiments, a subject having any mutation in the target gene known in the art and described as above can be treated using the methods and compositions described herein, wherein the target is SYNGAP1. In some embodiments, the mutation is within any intron or exon in the target gene.

### Alternative Splicing

[0391] As used herein, a “non-sense mediated RNA decay alternative exon” (or “NSAE”) is an exon created from alternative splicing events that contains a premature stop codon or other sequences that facilitate degradation of the mRNA containing the of the instant exon. “NSAE pre-mRNA” is a pre-mRNA transcript that contains at least one non-sense mediated RNA decay alternative exon. Alternative or aberrant splicing of the pre-mRNA can result in the inclusion of at least one NSAE in the mature mRNA transcripts. The terms “mature mRNA,” “fully processed,” and “fully-spliced mRNA,” are used interchangeably herein to describe a fully processed mRNA. Inclusion of at least one NSAE can result in non-productive mRNA. Mature NSAE-containing mRNA may sometimes lead to aberrant protein expression. The term “canonical exon” refers to the exon that does not lead to non-sense mediated decay, or default exon, or exon that is not the product of alternative splicing. The term “canonical splicing” refers to a splicing process that results in the preservation of the canonical exon in the mature RNA.

[0392] A NSAE can be created as a result of splicing out additional base pairs.

[0393] The degree of alternative splicing can be expressed as percent alternative splicing, e.g., the percentage of transcripts in which a given NSAE is included. In brief, percent alternative splicing can be calculated as the percentage of the amount of RNA transcripts with the NSAE, over the sum of the average of the amount of RNA transcripts with a NSAE plus the average of the amount of RNA transcripts with only the canonical exons.

[0394] In some embodiments, a NSAE is an exon that is identified as a NSAE based on a determination of at least about 5%, at least about 10%, at least about 15%, at least about 20%, at least about 25%, at least about 30%, at least about 35%, at least about 40%, at least about 45%, or at least about 50%, exclusion from the RNA transcript. In some embodiments, a NSAE is an exon that is identified as a NSAE based on a determination of about 5% to about 100%, about 5% to about 95%, about 5% to about 90%, about 5% to about 85%, about 5% to about 80%, about 5% to about 75%, about 5% to about 70%, about 5% to about 65%, about 5% to about 60%, about 5% to about 55%, about 5% to about 50%, about 5% to about 45%, about 5% to about 40%, about 5% to about 35%, about 5% to about 30%, about 5% to about 25%, about 5% to about 20%, about 5% to about 15%, about 10% to about 100%, about 10% to about 95%, about 10% to about 90%, about 10% to about 85%, about 10% to about 80%, about 10% to about 75%, about 10% to about 70%, about 10% to about 65%, about 10% to about 60%, about 10% to about 55%, about 10% to about 50%, about 10% to about 45%, about 10% to about 40%, about 10% to about 35%, about 10% to about 30%, about 10% to about 25%, about 10% to about 20%, about 15% to about 100%, about 15% to about 95%, about 15% to about 90%, about 15% to about 85%, about 15% to about 80%, about 15% to about 75%, about 15% to about 70%, about 15% to about 65%, about 15% to about 60%, about 15% to about 55%, about 15% to about 50%, about 15% to about 45%, about 15% to about 40%, about 15% to about 35%, about 15% to about 30%, about 15% to about 25%, about 20% to about 100%, about 20% to about 95%, about 20% to about 90%, about 20% to about 85%, about 20% to about 80%, about 20% to about 75%, about 20% to about 70%, about 20% to about 65%, about 20% to about 60%, about 20% to about 55%, about 20% to about 50%, about 20% to about 45%, about 20% to about 40%, about 20% to about 35%, about 20% to about 30%, about 25% to about 100%, about 25% to about 95%, about 25% to about 90%, about 25% to about 85%, about 25% to about 80%, about 25% to about 75%, about 25% to about 70%, about 25% to about 65%, about 25% to about 60%, about 25% to about 55%, about 25% to about 50%, about 25% to about 45%, about 25% to about 40%, or about 25% to about 35%, exclusion from the RNA transcript. ENCODE data (described by, e.g., Tilgner, et al., 2012, “Deep sequencing of subcellular RNA fractions shows splicing to be predominantly co-transcriptional in the human genome but inefficient for lncRNAs,” Genome Research 22(9):1616-25) can be used to aid in identifying NSAE's created from alternative splicing events.

[0395] In some embodiments, contacting cells with an ASO that is complementary to a targeted portion of a SYNGAP1 pre-mRNA transcript results in an increase in the amount of SYNGAP1 protein produced by at least 10, 20, 30, 40, 50, 60, 80, 100, 150, 200, 250, 300, 350, 400, 450, 500, or 1000%, compared to the amount of the protein produced by a cell in the absence of the ASO/absence of treatment. In some embodiments, the total amount of SYNGAP1 protein produced by the cell to which the antisense oligomer is contacted is increased about 20% to about 300%, about 50% to about 300%, about 100% to about 300%, about 150% to about 300%, about 20% to about 50%, about 20% to about 100%, about 20% to about 150%, about 20% to about 200%, about 20% to about 250%, about 50% to about 100%, about 50% to about 150%, about 50% to about 200%, about 50% to about 250%, about 100% to about 150%, about 100% to about 200%, about 100% to about 250%, about 150% to about 200%, about 150% to about 250%, about 200% to about 250%, at least about 10%, at least about 20%, at least about 50%, at least about 100%, at least about 150%, at least about 200%, at least about 250%, or at least about 300%, compared to the amount of target protein produced by a control compound. In some embodiments, the total amount of SYNGAP1 protein produced by the cell to which the antisense oligomer is contacted is increased about 1.1 to about 10-fold, about 1.5 to about 10-fold, about 2 to about 10-fold, about 3 to about 10-fold, about 4 to about 10-fold, about 1.1 to about 5-fold, about 1.1 to about 6-fold, about 1.1 to about 7-fold, about 1.1 to about 8-fold, about 1.1 to about 9-fold, about 2 to about 5-fold, about 2 to about 6-fold, about 2 to about 7-fold, about 2 to about 8-fold, about 2 to about 9-fold, about 3 to about 6-fold, about 3 to about 7-fold, about 3 to about 8-fold, about 3 to about 9-fold, about 4 to about 7-fold, about 4 to about 8-fold, about 4 to about 9-fold, at least about 1.1-fold, at least about 1.5-fold, at least about 2-fold, at least about 2.5-fold, at least about 3-fold, at least about 3.5-fold, at least about 4-fold, at least about 5-fold, or at least about 10-fold, compared to the amount of target protein produced by a control compound. A control compound can be, for example, an oligonucleotide that is not complementary to a targeted portion of the pre-mRNA.

[0396] In some embodiments, contacting cells with an ASO that is complementary to a targeted portion of a SYNGAP1 pre-mRNA transcript results in a decrease in the amount of SYNGAP1 protein produced by at least 10, 20, 30, 40, 50, 60, 80, 100, 150, 200, 250, 300, 350, 400, 450, 500, or 1000%, compared to the amount of the protein produced by a cell in the absence of the ASO/absence of treatment. In some embodiments, the mutation is within any intron or exon in the target gene. In some embodiments, the total amount of SYNGAP1 protein produced by the cell to which the antisense oligomer is contacted is decreased about 20% to about 300%, about 50% to about 300%, about 100% to about 300%, about 150% to about 300%, about 20% to about 50%, about 20% to about 100%, about 20% to about 150%, about 20% to about 200%, about 20% to about 250%, about 50% to about 100%, about 50% to about 150%, about 50% to about 200%, about 50% to about 250%, about 100% to about 150%, about 100% to about 200%, about 100% to about 250%, about 150% to about 200%, about 150% to about 250%, about 200% to about 250%, at least about 10%, at least about 20%, at least about 50%, at least about 100%, at least about 150%, at least about 200%, at least about 250%, or at least about 300%, compared to the amount of target protein produced by a control compound. In some embodiments, the total amount of SYNGAP1 protein produced by the cell to which the antisense oligomer is contacted is decreased about 1.1 to about 10-fold, about 1.5 to about 10-fold, about 2 to about 10-fold, about 3 to about 10-fold, about 4 to about 10-fold, about 1.1 to about 5-fold, about 1.1 to about 6-fold, about 1.1 to about 7-fold, about 1.1 to about 8-fold, about 1.1 to about 9-fold, about 2 to about 5-fold, about 2 to about 6-fold, about 2 to about 7-fold, about 2 to about 8-fold, about 2 to about 9-fold, about 3 to about 6-fold, about 3 to about 7-fold, about 3 to about 8-fold, about 3 to about 9-fold, about 4 to about 7-fold, about 4 to about 8-fold, about 4 to about 9-fold, at least about 1.1-fold, at least about 1.5-fold, at least about 2-fold, at least about 2.5-fold, at least about 3-fold, at least about 3.5-fold, at least about 4-fold, at least about 5-fold, or at least about 10-fold, compared to the amount of target protein produced by a control compound. A control compound can be, for example, an oligonucleotide that is not complementary to a targeted portion of the pre-mRNA.

[0397] In some embodiments, contacting cells with an ASO that is complementary to a targeted portion of a SYNGAP1 pre-mRNA transcript results in an increase in the amount of mRNA encoding SYNGAP1, including the mature mRNA encoding the target protein. In some embodiments, the amount of mRNA encoding SYNGAP1 protein, or the mature mRNA encoding the SYNGAP1 protein, is increased by at least 10, 20, 30, 40, 50, 60, 80, 100, 150, 200, 250, 300, 350, 400, 450, 500, or 1000%, compared to the amount of the protein produced by a cell in the absence of the ASO/absence of treatment. In some embodiments, the total amount of the mRNA encoding SYNGAP1 protein, or the mature mRNA encoding SYNGAP1 protein produced in the cell to which the antisense oligomer is contacted is increased about 20% to about 300%, about 50% to about 300%, about 100% to about 300%, about 150% to about 300%, about 20% to about 50%, about 20% to about 100%, about 20% to about 150%, about 20% to about 200%, about 20% to about 250%, about 50% to about 100%, about 50% to about 150%, about 50% to about 200%, about 50% to about 250%, about 100% to about 150%, about 100% to about 200%, about 100% to about 250%, about 150% to about 200%, about 150% to about 250%, about 200% to about 250%, at least about 10%, at least about 20%, at least about 50%, at least about 100%, at least about 150%, at least about 200%, at least about 250%, or at least about 300%, compared to the amount of mature RNA produced in an untreated cell, e.g., an untreated cell or a cell treated with a control compound. In some embodiments, the total amount of the mRNA encoding SYNGAP1 protein, or the mature mRNA encoding SYNGAP1 protein produced in the cell to which the antisense oligomer is contacted is increased about 1.1 to about 10-fold, about 1.5 to about 10-fold, about 2 to about 10-fold, about 3 to about 10-fold, about 4 to about 10-fold, about 1.1 to about 5-fold, about 1.1 to about 6-fold, about 1.1 to about 7-fold, about 1.1 to about 8-fold, about 1.1 to about 9-fold, about 2 to about 5-fold, about 2 to about 6-fold, about 2 to about 7-fold, about 2 to about 8-fold, about 2 to about 9-fold, about 3 to about 6-fold, about 3 to about 7-fold, about 3 to about 8-fold, about 3 to about 9-fold, about 4 to about 7-fold, about 4 to about 8-fold, about 4 to about 9-fold, at least about 1.1-fold, at least about 1.5-fold, at least about 2-fold, at least about 2.5-fold, at least about 3-fold, at least about 3.5-fold, at least about 4-fold, at least about 5-fold, or at least about 10-fold compared to the amount of mature RNA produced in an untreated cell, e.g., an untreated cell or a cell treated with a control compound. A control compound can be, for example, an oligonucleotide that is not complementary to a targeted portion of the SYNGAP1 pre-mRNA.

[0398] In some embodiments, contacting cells with an ASO that is complementary to a targeted portion of a SYNGAP1 pre-mRNA transcript results in a decrease in the amount of mRNA encoding SYNGAP1, including the mature mRNA encoding the target protein. In some embodiments, the mutation is within any intron or exon in the target gene. In some embodiments, the amount of mRNA encoding SYNGAP1 protein, or the mature mRNA encoding the SYNGAP1 protein, is decreased by at least 10, 20, 30, 40, 50, 60, 80, 100, 150, 200, 250, 300, 350, 400, 450, 500, or 1000%, compared to the amount of the protein produced by a cell in the absence of the ASO/absence of treatment. In some embodiments, the total amount of the mRNA encoding SYNGAP1 protein, or the mature mRNA encoding SYNGAP1 protein produced in the cell to which the antisense oligomer is contacted is decreased about 20% to about 300%, about 50% to about 300%, about 100% to about 300%, about 150% to about 300%, about 20% to about 50%, about 20% to about 100%, about 20% to about 150%, about 20% to about 200%, about 20% to about 250%, about 50% to about 100%, about 50% to about 150%, about 50% to about 200%, about 50% to about 250%, about 100% to about 150%, about 100% to about 200%, about 100% to about 250%, about 150% to about 200%, about 150% to about 250%, about 200% to about 250%, at least about 10%, at least about 20%, at least about 50%, at least about 100%, at least about 150%, at least about 200%, at least about 250%, or at least about 300%, compared to the amount of mature RNA produced in an untreated cell, e.g., an untreated cell or a cell treated with a control compound. In some embodiments, the total amount of the mRNA encoding SYNGAP1 protein, or the mature mRNA encoding SYNGAP1 protein produced in the cell to which the antisense oligomer is contacted is decreased about 1.1 to about 10-fold, about 1.5 to about 10-fold, about 2 to about 10-fold, about 3 to about 10-fold, about 4 to about 10-fold, about 1.1 to about 5-fold, about 1.1 to about 6-fold, about 1.1 to about 7-fold, about 1.1 to about 8-fold, about 1.1 to about 9-fold, about 2 to about 5-fold, about 2 to about 6-fold, about 2 to about 7-fold, about 2 to about 8-fold, about 2 to about 9-fold, about 3 to about 6-fold, about 3 to about 7-fold, about 3 to about 8-fold, about 3 to about 9-fold, about 4 to about 7-fold, about 4 to about 8-fold, about 4 to about 9-fold, at least about 1.1-fold, at least about 1.5-fold, at least about 2-fold, at least about 2.5-fold, at least about 3-fold, at least about 3.5-fold, at least about 4-fold, at least about 5-fold, or at least about 10-fold compared to the amount of mature RNA produced in an untreated cell, e.g., an untreated cell or a cell treated with a control compound. A control compound can be, for example, an oligonucleotide that is not complementary to a targeted portion of the SYNGAP1 pre-mRNA.

[0399] In some embodiments, contacting cells with an ASO that is complementary to a targeted portion of a target pre-mRNA transcript results in an increase in the amount of the target protein produced by at least 10, 20, 30, 40, 50, 60, 80, 100, 150, 200, 250, 300, 350, 400, 450, 500, or 1000%, compared to the amount of the protein produced by a cell in the absence of the ASO/absence of treatment, wherein the target is SYNGAP1. In some embodiments, the mutation is within any intron or exon in the target gene. In some embodiments, the total amount of the target protein produced by the cell to which the antisense oligomer is contacted is increased about 20% to about 300%, about 50% to about 300%, about 100% to about 300%, about 150% to about 300%, about 20% to about 50%, about 20% to about 100%, about 20% to about 150%, about 20% to about 200%, about 20% to about 250%, about 50% to about 100%, about 50% to about 150%, about 50% to about 200%, about 50% to about 250%, about 100% to about 150%, about 100% to about 200%, about 100% to about 250%, about 150% to about 200%, about 150% to about 250%, about 200% to about 250%, at least about 10%, at least about 20%, at least about 50%, at least about 100%, at least about 150%, at least about 200%, at least about 250%, or at least about 300%, compared to the amount of target protein produced by a control compound. In some embodiments, the total amount of the target protein produced by the cell to which the antisense oligomer is contacted is increased about 1.1 to about 10-fold, about 1.5 to about 10-fold, about 2 to about 10-fold, about 3 to about 10-fold, about 4 to about 10-fold, about 1.1 to about 5-fold, about 1.1 to about 6-fold, about 1.1 to about 7-fold, about 1.1 to about 8-fold, about 1.1 to about 9-fold, about 2 to about 5-fold, about 2 to about 6-fold, about 2 to about 7-fold, about 2 to about 8-fold, about 2 to about 9-fold, about 3 to about 6-fold, about 3 to about 7-fold, about 3 to about 8-fold, about 3 to about 9-fold, about 4 to about 7-fold, about 4 to about 8-fold, about 4 to about 9-fold, at least about 1.1-fold, at least about 1.5-fold, at least about 2-fold, at least about 2.5-fold, at least about 3-fold, at least about 3.5-fold, at least about 4-fold, at least about 5-fold, or at least about 10-fold, compared to the amount of target protein produced by a control compound. A control compound can be, for example, an oligonucleotide that is not complementary to a targeted portion of the pre-mRNA.

[0400] In some embodiments, contacting cells with an ASO that is complementary to a targeted portion of a target pre-mRNA transcript results in a decrease in the amount of the target protein produced by at least 10, 20, 30, 40, 50, 60, 80, 100, 150, 200, 250, 300, 350, 400, 450, 500, or 1000%, compared to the amount of the protein produced by a cell in the absence of the ASO/absence of treatment, wherein the target is SYNGAP1. In some embodiments, the mutation is within any intron or exon in the target gene. In some embodiments, the total amount of the target protein produced by the cell to which the antisense oligomer is contacted is decreased about 20% to about 300%, about 50% to about 300%, about 100% to about 300%, about 150% to about 300%, about 20% to about 50%, about 20% to about 100%, about 20% to about 150%, about 20% to about 200%, about 20% to about 250%, about 50% to about 100%, about 50% to about 150%, about 50% to about 200%, about 50% to about 250%, about 100% to about 150%, about 100% to about 200%, about 100% to about 250%, about 150% to about 200%, about 150% to about 250%, about 200% to about 250%, at least about 10%, at least about 20%, at least about 50%, at least about 100%, at least about 150%, at least about 200%, at least about 250%, or at least about 300%, compared to the amount of target protein produced by a control compound. In some embodiments, the total amount of the target protein produced by the cell to which the antisense oligomer is contacted is decreased about 1.1 to about 10-fold, about 1.5 to about 10-fold, about 2 to about 10-fold, about 3 to about 10-fold, about 4 to about 10-fold, about 1.1 to about 5-fold, about 1.1 to about 6-fold, about 1.1 to about 7-fold, about 1.1 to about 8-fold, about 1.1 to about 9-fold, about 2 to about 5-fold, about 2 to about 6-fold, about 2 to about 7-fold, about 2 to about 8-fold, about 2 to about 9-fold, about 3 to about 6-fold, about 3 to about 7-fold, about 3 to about 8-fold, about 3 to about 9-fold, about 4 to about 7-fold, about 4 to about 8-fold, about 4 to about 9-fold, at least about 1.1-fold, at least about 1.5-fold, at least about 2-fold, at least about 2.5-fold, at least about 3-fold, at least about 3.5-fold, at least about 4-fold, at least about 5-fold, or at least about 10-fold, compared to the amount of target protein produced by a control compound. A control compound can be, for example, an oligonucleotide that is not complementary to a targeted portion of the pre-mRNA.

[0401] In some embodiments, contacting cells with an ASO that is complementary to a targeted portion of a target pre-mRNA transcript results in an increase in the amount of mRNA encoding the target protein, including the mature mRNA encoding the target protein, wherein the target is SYNGAP1. In some embodiments, the mutation is within any intron or exon in the target gene. In some embodiments, the amount of mRNA encoding the target protein, or the mature mRNA encoding the target protein, is increased by at least 10, 20, 30, 40, 50, 60, 80, 100, 150, 200, 250, 300, 350, 400, 450, 500, or 1000%, compared to the amount of the protein produced by a cell in the absence of the ASO/absence of treatment. In some embodiments, the total amount of the mRNA encoding the target protein, or the mature mRNA encoding the target protein produced in the cell to which the antisense oligomer is contacted is increased about 20% to about 300%, about 50% to about 300%, about 100% to about 300%, about 150% to about 300%, about 20% to about 50%, about 20% to about 100%, about 20% to about 150%, about 20% to about 200%, about 20% to about 250%, about 50% to about 100%, about 50% to about 150%, about 50% to about 200%, about 50% to about 250%, about 100% to about 150%, about 100% to about 200%, about 100% to about 250%, about 150% to about 200%, about 150% to about 250%, about 200% to about 250%, at least about 10%, at least about 20%, at least about 50%, at least about 100%, at least about 150%, at least about 200%, at least about 250%, or at least about 300%, compared to the amount of mature RNA produced in an untreated cell, e.g., an untreated cell or a cell treated with a control compound. In some embodiments, the total amount of the mRNA encoding the target protein, or the mature mRNA encoding the target protein produced in the cell to which the antisense oligomer is contacted is increased about 1.1 to about 10-fold, about 1.5 to about 10-fold, about 2 to about 10-fold, about 3 to about 10-fold, about 4 to about 10-fold, about 1.1 to about 5-fold, about 1.1 to about 6-fold, about 1.1 to about 7-fold, about 1.1 to about 8-fold, about 1.1 to about 9-fold, about 2 to about 5-fold, about 2 to about 6-fold, about 2 to about 7-fold, about 2 to about 8-fold, about 2 to about 9-fold, about 3 to about 6-fold, about 3 to about 7-fold, about 3 to about 8-fold, about 3 to about 9-fold, about 4 to about 7-fold, about 4 to about 8-fold, about 4 to about 9-fold, at least about 1.1-fold, at least about 1.5-fold, at least about 2-fold, at least about 2.5-fold, at least about 3-fold, at least about 3.5-fold, at least about 4-fold, at least about 5-fold, or at least about 10-fold compared to the amount of mature RNA produced in an untreated cell, e.g., an untreated cell or a cell treated with a control compound. A control compound can be, for example, an oligonucleotide that is not complementary to a targeted portion of the target pre-mRNA.

[0402] In some embodiments, contacting cells with an ASO that is complementary to a targeted portion of a target pre-mRNA transcript results in a decrease in the amount of mRNA encoding the target protein, including the mature mRNA encoding the target protein, wherein the target is SYNGAP1. In some embodiments, the mutation is within any intron or exon in the target gene. In some embodiments, the amount of mRNA encoding the target protein, or the mature mRNA encoding the target protein, is decreased by at least 10, 20, 30, 40, 50, 60, 80, 100, 150, 200, 250, 300, 350, 400, 450, 500, or 1000%, compared to the amount of the protein produced by a cell in the absence of the ASO/absence of treatment. In some embodiments, the total amount of the mRNA encoding the target protein, or the mature mRNA encoding the target protein produced in the cell to which the antisense oligomer is contacted is decreased about 20% to about 300%, about 50% to about 300%, about 100% to about 300%, about 150% to about 300%, about 20% to about 50%, about 20% to about 100%, about 20% to about 150%, about 20% to about 200%, about 20% to about 250%, about 50% to about 100%, about 50% to about 150%, about 50% to about 200%, about 50% to about 250%, about 100% to about 150%, about 100% to about 200%, about 100% to about 250%, about 150% to about 200%, about 150% to about 250%, about 200% to about 250%, at least about 10%, at least about 20%, at least about 50%, at least about 100%, at least about 150%, at least about 200%, at least about 250%, or at least about 300%, compared to the amount of mature RNA produced in an untreated cell, e.g., an untreated cell or a cell treated with a control compound. In some embodiments, the total amount of the mRNA encoding the target protein, or the mature mRNA encoding the target protein produced in the cell to which the antisense oligomer is contacted is decreased about 1.1 to about 10-fold, about 1.5 to about 10-fold, about 2 to about 10-fold, about 3 to about 10-fold, about 4 to about 10-fold, about 1.1 to about 5-fold, about 1.1 to about 6-fold, about 1.1 to about 7-fold, about 1.1 to about 8-fold, about 1.1 to about 9-fold, about 2 to about 5-fold, about 2 to about 6-fold, about 2 to about 7-fold, about 2 to about 8-fold, about 2 to about 9-fold, about 3 to about 6-fold, about 3 to about 7-fold, about 3 to about 8-fold, about 3 to about 9-fold, about 4 to about 7-fold, about 4 to about 8-fold, about 4 to about 9-fold, at least about 1.1-fold, at least about 1.5-fold, at least about 2-fold, at least about 2.5-fold, at least about 3-fold, at least about 3.5-fold, at least about 4-fold, at least about 5-fold, or at least about 10-fold compared to the amount of mature RNA produced in an untreated cell, e.g., an untreated cell or a cell treated with a control compound. A control compound can be, for example, an oligonucleotide that is not complementary to a targeted portion of the target pre-mRNA.

### Therapeutic Agents

[0403] In various embodiments of the present disclosure, compositions and methods comprising a therapeutic agent are provided to modulate protein expression level of SYNGAP1. In some embodiments, provided herein are compositions and methods to modulate alternative splicing of SYNGAP1 pre-mRNA. In some embodiments, provided herein are compositions and methods to modulate alternative splicing in the splicing of SYNGAP1 pre-mRNA, e.g., to prevent inclusion of a NSAE during splicing of SYNGAP1 pre-mRNA and preserve canonical exons.

[0404] In various embodiments of the present disclosure, compositions and methods comprising a therapeutic agent are provided to modulate protein expression level of the target. In some embodiments, provided herein are compositions and methods to modulate alternative splicing of the target pre-mRNA. In some embodiments, provided herein are compositions and methods to modulate alternative splicing in the splicing of the target pre-mRNA, e.g., to prevent inclusion of a NSAE during splicing of the target pre-mRNA and preserve canonical exons, wherein the target is SYNGAP1.

[0405] A therapeutic agent disclosed herein can be an alternative splicing repressor agent. In some embodiments, a therapeutic agent may comprise a polynucleic acid polymer. In other embodiments, a therapeutic agent may comprise a small molecule. In other embodiments, a therapeutic agent may comprise a polypeptide. In some embodiments, the therapeutic agent is a nucleic acid binding protein, with or without being complexed with a nucleic acid molecule. In other embodiments, the therapeutic agent is a nucleic acid molecule that encodes for another therapeutic agent. In further embodiments, the therapeutic agent is incorporated into a viral delivery system, such as an adenovirus-associated vector.

[0406] According to one aspect of the present disclosure, provided herein is a method of treatment or prevention of a condition associated with a functional-SYNGAP1 protein deficiency, comprising administering an alternative splicing repressor agent to a subject to increase levels of functional SYNGAP1 protein, wherein the agent binds to a region of the pre-mRNA transcript to decrease inclusion of the NSAE in the mature transcript. For example, provided herein is a method of treatment or prevention of a condition associated with a functional-SYNGAP1 protein deficiency, comprising administering an alternative splicing repressor agent to a subject to increase levels of functional SYNGAP1 protein, wherein the agent binds to a region of an exon or an intron (e.g., exon 10 or 11, intron 10 or intron 11 in human SYNGAP1 gene) of the pre-mRNA transcript.

[0407] According to one aspect of the present disclosure, provided herein is a method of treatment or prevention of a condition associated with a functional target protein deficiency, comprising administering an alternative splicing repressor agent to a subject to increase levels of functional target protein, wherein the agent binds to a region of the pre-mRNA transcript to decrease inclusion of the NSAE in the mature transcript. For example, provided herein is a method of treatment or prevention of a condition associated with a functional target protein deficiency, comprising administering an alternative splicing repressor agent to a subject to increase levels of functional target protein, wherein the agent binds to a region of an exon or an intron of the pre-mRNA transcript, wherein the target is SYNGAP1.

[0408] In some embodiments, provided herein is a method of treatment or prevention of a condition associated with a functional-SYNGAP1 protein overexpression, comprising administering an alternative splicing modulator agent to a subject to decrease levels of functional SYNGAP1 protein, wherein the agent binds to a region of the pre-mRNA transcript to increase inclusion of the NSAE in the mature transcript. For example, provided herein is a method of treatment or prevention of a condition associated with a functional-SYNGAP1 protein overexpression, comprising administering an alternative splicing modulator agent to a subject to decrease levels of functional SYNGAP1 protein, wherein the agent binds to a region of an exon or an intron (e.g., exon 10 or 11, intron 10 or intron 11 in human SYNGAP1 gene) of the pre-mRNA transcript.

[0409] According to one aspect of the present disclosure, provided herein is a method of treatment or prevention of a condition associated with a functional target protein overexpression, comprising administering an alternative splicing modulator agent to a subject to decrease levels of functional target protein, wherein the agent binds to a region of the pre-mRNA transcript to increase inclusion of the NSAE in the mature transcript. For example, provided herein is a method of treatment or prevention of a condition associated with a functional target protein overexpression, comprising administering an alternative splicing repressor agent to a subject to decrease levels of functional target protein, wherein the agent binds to a region of an exon or an intron of the pre-mRNA transcript, wherein the target is SYNGAP1.

[0410] Where reference is made to reducing alternative splicing in the mature mRNA, the reduction may be complete, e.g., 100%, or may be partial. The reduction may be clinically significant. The reduction/correction may be relative to the level of alternative splicing in the subject without treatment, or relative to the amount of alternative splicing in a population of similar subjects. The reduction/correction may be at least 10% less alternative splicing relative to the average subject, or the subject prior to treatment. The reduction may be at least 20% less alternative splicing relative to an average subject, or the subject prior to treatment. The reduction may be at least 40% less alternative splicing relative to an average subject, or the subject prior to treatment. The reduction may be at least 50% less alternative splicing relative to an average subject, or the subject prior to treatment. The reduction may be at least 60% less alternative splicing relative to an average subject, or the subject prior to treatment. The reduction may be at least 80% less alternative splicing relative to an average subject, or the subject prior to treatment. The reduction may be at least 90% less alternative splicing relative to an average subject, or the subject prior to treatment.

[0411] Where reference is made to increasing alternative splicing in the mature mRNA, the increase may be complete, e.g., 100%, or may be partial. The increase may be clinically significant. The increase/correction may be relative to the level of alternative splicing in the subject without treatment, or relative to the amount of alternative splicing in a population of similar subjects. The increase/correction may be at least 10% more alternative splicing relative to the average subject, or the subject prior to treatment. The increase may be at least 20% more alternative splicing relative to an average subject, or the subject prior to treatment. The increase may be at least 40% more alternative splicing relative to an average subject, or the subject prior to treatment. The increase may be at least 50% more alternative splicing relative to an average subject, or the subject prior to treatment. The increase may be at least 60% more alternative splicing relative to an average subject, or the subject prior to treatment. The increase may be at least 80% more alternative splicing relative to an average subject, or the subject prior to treatment. The increase may be at least 90% more alternative splicing relative to an average subject, or the subject prior to treatment.

[0412] Where reference is made to increasing functional-SYNGAP1 protein levels, the increase may be clinically significant. The increase may be relative to the level of functional-SYNGAP1 protein in the subject without treatment, or relative to the amount of functional-SYNGAP1 protein in a population of similar subjects. The increase may be at least 10% more functional-SYNGAP1 protein relative to the average subject, or the subject prior to treatment. The increase may be at least 20% more functional-SYNGAP1 protein relative to the average subject, or the subject prior to treatment. The increase may be at least 40% more functional-SYNGAP1 protein relative to the average subject, or the subject prior to treatment. The increase may be at least 50% more functional-SYNGAP1 protein relative to the average subject, or the subject prior to treatment. The increase may be at least 80% more functional-SYNGAP1 protein relative to the average subject, or the subject prior to treatment. The increase may be at least 100% more functional-SYNGAP1 protein relative to the average subject, or the subject prior to treatment. The increase may be at least 200% more functional-SYNGAP1 protein relative to the average subject, or the subject prior to treatment. The increase may be at least 500% more functional-SYNGAP1 protein relative to the average subject, or the subject prior to treatment.

[0413] Where reference is made to decreasing functional-SYNGAP1 protein levels, the decrease may be clinically significant. The decrease may be relative to the level of functional-SYNGAP1 protein in the subject without treatment, or relative to the amount of functional-SYNGAP1 protein in a population of similar subjects. The decrease may be at least 10% less functional-SYNGAP1 protein relative to the average subject, or the subject prior to treatment. The decrease may be at least 20% less functional-SYNGAP1 protein relative to the average subject, or the subject prior to treatment. The decrease may be at least 40% less functional-SYNGAP1 protein relative to the average subject, or the subject prior to treatment. The decrease may be at least 50% less functional-SYNGAP1 protein relative to the average subject, or the subject prior to treatment. The decrease may be at least 80% less functional-SYNGAP1 protein relative to the average subject, or the subject prior to treatment. The decrease may be at least 100% less functional-SYNGAP1 protein relative to the average subject, or the subject prior to treatment.

[0414] Where reference is made to increasing functional target protein levels, the increase may be clinically significant, wherein the target is SYNGAP1. The increase may be relative to the level of functional target protein in the subject without treatment, or relative to the amount of functional target protein in a population of similar subjects. The increase may be at least 10% more functional target protein relative to the average subject, or the subject prior to treatment. The increase may be at least 20% more functional target protein relative to the average subject, or the subject prior to treatment. The increase may be at least 40% more functional target protein relative to the average subject, or the subject prior to treatment. The increase may be at least 50% more functional target protein relative to the average subject, or the subject prior to treatment. The increase may be at least 80% more functional target protein relative to the average subject, or the subject prior to treatment. The increase may be at least 100% more functional target protein relative to the average subject, or the subject prior to treatment. The increase may be at least 200% more functional target protein relative to the average subject, or the subject prior to treatment. The increase may be at least 500% more functional target protein relative to the average subject, or the subject prior to treatment.

[0415] Where reference is made to decreasing functional target protein levels, the decrease may be clinically significant, wherein the target is SYNGAP1. The decrease may be relative to the level of functional target protein in the subject without treatment, or relative to the amount of functional target protein in a population of similar subjects. The decrease may be at least 10% less functional target protein relative to the average subject, or the subject prior to treatment. The decrease may be at least 20% less functional target protein relative to the average subject, or the subject prior to treatment. The decrease may be at least 40% less functional target protein relative to the average subject, or the subject prior to treatment. The decrease may be at least 50% less functional target protein relative to the average subject, or the subject prior to treatment. The decrease may be at least 80% less functional target protein relative to the average subject, or the subject prior to treatment. The decrease may be at least 100% less functional target protein relative to the average subject, or the subject prior to treatment.

[0416] In embodiments wherein the alternative splicing repressor agent comprises a polynucleic acid polymer, the polynucleic acid polymer may be about 50 nucleotides in length. In embodiments wherein the alternative splicing modulator agent comprises a polynucleic acid polymer, the polynucleic acid polymer may be about 50 nucleotides in length. The polynucleic acid polymer may be about 45 nucleotides in length. The polynucleic acid polymer may be about 40 nucleotides in length. The polynucleic acid polymer may be about 35 nucleotides in length. The polynucleic acid polymer may be about 30 nucleotides in length. The polynucleic acid polymer may be about 24 nucleotides in length. The polynucleic acid polymer may be about 25 nucleotides in length. The polynucleic acid polymer may be about 20 nucleotides in length. The polynucleic acid polymer may be about 19 nucleotides in length. The polynucleic acid polymer may be about 18 nucleotides in length. The polynucleic acid polymer may be about 17 nucleotides in length. The polynucleic acid polymer may be about 16 nucleotides in length. The polynucleic acid polymer may be about 15 nucleotides in length. The polynucleic acid polymer may be about 14 nucleotides in length. The polynucleic acid polymer may be about 13 nucleotides in length. The polynucleic acid polymer may be about 12 nucleotides in length. The polynucleic acid polymer may be about 11 nucleotides in length. The polynucleic acid polymer may be about 10 nucleotides in length. The polynucleic acid polymer may be between about 10 and about 50 nucleotides in length. The polynucleic acid polymer may be between about 10 and about 45 nucleotides in length. The polynucleic acid polymer may be between about 10 and about 40 nucleotides in length. The polynucleic acid polymer may be between about 10 and about 35 nucleotides in length. The polynucleic acid polymer may be between about 10 and about 30 nucleotides in length. The polynucleic acid polymer may be between about 10 and about 25 nucleotides in length. The polynucleic acid polymer may be between about 10 and about 20 nucleotides in length. The polynucleic acid polymer may be between about 15 and about 25 nucleotides in length. The polynucleic acid polymer may be between about 15 and about 30 nucleotides in length. The polynucleic acid polymer may be between about 12 and about 30 nucleotides in length.

[0417] The sequence of the polynucleic acid polymer may be at least 50%, 55%, 60%, 65%, 70%, 75%, 80%, 85%, 90%, 91%, 92%, 93%, 94%, 95%, 96%, 97%, 98%, 99%, or 99.5% complementary to a target sequence of an mRNA transcript, e.g., a partially processed mRNA transcript. The sequence of the polynucleic acid polymer may be 100% complementary to a target sequence of a pre-mRNA transcript.

[0418] The sequence of the polynucleic acid polymer may have 4 or fewer mismatches to a target sequence of the pre-mRNA transcript. The sequence of the polynucleic acid polymer may have 3 or fewer mismatches to a target sequence of the pre-mRNA transcript. The sequence of the polynucleic acid polymer may have 2 or fewer mismatches to a target sequence of the pre-mRNA transcript. The sequence of the polynucleic acid polymer may have 1 or fewer mismatches to a target sequence of the pre-mRNA transcript. The sequence of the polynucleic acid polymer may have no mismatches to a target sequence of the pre-mRNA transcript.

[0419] In some embodiments, the polynucleic acid polymer may specifically hybridize to a target sequence of the pre-mRNA transcript. For example, the polynucleic acid polymer may have 91%, 92%, 93%, 94%, 95%, 96%, 97%, 98%, 99%, 99.5%, or 100% sequence complementarity to a target sequence of the pre-mRNA transcript. The hybridization may be under high stringent hybridization conditions.

[0420] The polynucleic acid polymer may have a sequence with at least 50%, 55%, 60%, 65%, 70%, 75%, 80%, 85%, 90%, 91%, 92%, 93%, 94%, 95%, 96%, 97%, 98%, 99%, or 99.5% sequence identity to a sequence of Table 1 or Table 2. The polynucleic acid polymer may have a sequence with 100% sequence identity to a sequence selected from the group consisting of the sequences of Table 1 and Table 2. In some embodiments, the polynucleic acid polymer comprises a sequence with at least 50%, 55%, 60%, 65%, 70%, 75%, 80%, 85%, 90%, 91%, 92%, 93%, 94%, 95%, 96%, 97%, 98%, 99%, or 99.5% sequence identity to any one selected from the group consisting of the sequences of Table 1 and Table 2. In some embodiments, the polynucleic acid polymer comprises a sequence with 100% sequence identity to any one selected from the group consisting of the sequences of Table 1 and Table 2. In some embodiments the polynucleic acid polymer is a polynucleic acid polymer of at least 50%, 55%, 60%, 65%, 70%, 75%, 80%, 85%, 90%, 91%, 92%, 93%, 94%, 95%, 96%, 97%, 98%, 99%, or 99.5% sequence identity to any one selected from the group consisting of the sequences of Table 1 and Table 2. In some embodiments, the polynucleic acid polymer is a polynucleic acid polymer of any one selected from the group consisting of the sequences of Table 1 and Table 2.

TABLE 1
Exemplary ASOs targeting NSAE event

| ASO | | | | | | | |
|---|---|---|---|---|---|---|---|
| (Bold = 2'MOE, | | | | | | | |
| Italicized = LNA, | | ASO | | | | | |
| underlined C = | SEQ | sequence with | SEQ | | | | |
| 5methylC) | ID | no mismatches | ID | Coordinate | | | Name |
| Sequence 5'-3' | NO: | Sequence 5'-3' | NO: | Chr | Start | End | Position ID |
| ATGGGAGAGAGATG | 30 | | | chr6 | 33440369 | 33440387 | SYNGAP1-IVS10- |
| GAGG | | | | | | | 166 |
| CAGAGATGGGAGAG | 31 | | | chr6 | 33440374 | 33440392 | SYNGAP1-IVS10- |
| AGAT | | | | | | | 161 |
| AGAGACAGAGATGG | 32 | | | chr6 | 33440379 | 33440397 | SYNGAP1-IVS10- |
| GAGA | | | | | | | 156 |
| CAGGGAGAGACAGA | 33 | | | chr6 | 33440384 | 33440402 | SYNGAP1-IVS10- |
| GATG | | | | | | | 151 |
| GACACCAGGGAGAG | 34 | | | chr6 | 33440389 | 33440407 | SYNGAP1-IVS10- |
| ACAG | | | | | | | 146 |
| AAACAGACACCAGG | 35 | | | chr6 | 33440394 | 33440412 | SYNGAP1-IVS10- |
| GAGA | | | | | | | 141 |
| AAGAAAAACAGACA | 36 | | | chr6 | 33440399 | 33440417 | SYNGAP1-IVS10- |
| CCAG | | | | | | | 136 |
| AGGAGAAGAAAAAC | 37 | | | chr6 | 33440404 | 33440422 | SYNGAP1-IVS10- |
| AGAC | | | | | | | 131 |
| AGAGGAGGAGAAGA | 38 | | | chr6 | 33440409 | 33440427 | SYNGAP1-IVS10- |
| AAAA | | | | | | | 126 |
| CAAGGAGAGGAGGA | 39 | | | chr6 | 33440414 | 33440432 | SYNGAP1-IVS10- |
| GAAG | | | | | | | 121 |
| AGAGACAAGGAGAG | 40 | | | chr6 | 33440419 | 33440437 | SYNGAP1-IVS10- |
| GAGG | | | | | | | 116 |
| GGGAGAGAGACAAG | 41 | | | chr6 | 33440424 | 33440442 | SYNGAP1-IVS10- |
| GAGA | | | | | | | 111 |
| GGTGTGGGAGAGAG | 42 | | | chr6 | 33440429 | 33440447 | SYNGAP1-IVS10- |
| ACAA | | | | | | | 106 |
| GGAGGGTTGTGGGA | 43 | GGAGGGGTGTG | 173 | chr6 | 33440434 | 33440452 | SYNGAP1-IVS10- |
| GAGA | | GGAGAGA | | | | | 101 |
| GAGATGGATGGGTG | 44 | GAGATGGAGGG | 174 | chr6 | 33440439 | 33440457 | SYNGAP1-IVS10- |
| TGGG | | GTGTGGG | | | | | 96 |
| GGAGAGAGATGGAT | 45 | GGAGAGAGATG | 175 | chr6 | 33440444 | 33440462 | SYNGAP1-IVS10- |
| GGGT | | GAGGGGT | | | | | 91 |
| ACGTGGGAGAGAGA | 46 | | | chr6 | 33440449 | 33440467 | SYNGAP1-IVS10- |
| TGGA | | | | | | | 86 |
| GAGACACGTGGGAG | 47 | | | chr6 | 33440454 | 33440472 | SYNGAP1-IVS10- |
| AGAG | | | | | | | 81 |
| AGGGAGAGACACGT | 48 | GGGGAGAGACA | 176 | chr6 | 33440459 | 33440477 | SYNGAP1-IVS10- |
| GGGA | | CGTGGGA | | | | | 76 |
| GGTGAGGGAAGAGA | 49 | GGTGAGGGGAG | 177 | chr6 | 33440464 | 33440482 | SYNGAP1-IVS10- |
| CACG | | AGACACG | | | | | 71 |
| GAGAAGGTGAAGGG | 50 | GAGAAGGTGAG | 178 | chr6 | 33440469 | 33440487 | SYNGAP1-IVS10- |
| AGAG | | GGGAGAG | | | | | 66 |
| AGGGAGAGAAGGTG | 51 | GGGGAGAGAAG | 179 | chr6 | 33440474 | 33440492 | SYNGAP1-IVS10- |
| AGGG | | GTGAGGG | | | | | 61 |
| TGGAGGGAGAGAGA | 52 | TGGAGGGGGAG | 180 | chr6 | 33440479 | 33440497 | SYNGAP1-IVS10- |
| AGGT | | AGAAGGT | | | | | 56 |
| AGAAATGGAGAGGG | 53 | AGAAATGGAGG | 181 | chr6 | 33440484 | 33440502 | SYNGAP1-IVS10- |
| AGAG | | GGGAGAG | | | | | 51 |
| GAGAGAGAAATGGA | 54 | GAGAGAGAAAT | 182 | chr6 | 33440489 | 33440507 | SYNGAP1-IVS10- |
| GGGA | | GGAGGGG | | | | | 46 |
| TTAGGGAGAGAGAA | 55 | | | chr6 | 33440494 | 33440512 | SYNGAP1-IVS10- |
| ATGG | | | | | | | 41 |
| ACAGATTAGGGAGA | 56 | | | chr6 | 33440499 | 33440517 | SYNGAP1-IVS10- |
| GAGA | | | | | | | 36 |
| AACAGACAGATTAG | 57 | | | chr6 | 33440504 | 33440522 | SYNGAP1-IVS10- |
| GGAG | | | | | | | 31 |
| GAGGGAACAGACAG | 58 | | | chr6 | 33440509 | 33440527 | SYNGAP1-IVS10- |
| ATTA | | | | | | | 26 |
| TGGCAGAGGGAACA | 59 | | | chr6 | 33440514 | 33440532 | SYNGAP1-IVS10- |
| GACA | | | | | | | 21 |
| GGCCATGGCAGAGG | 60 | | | chr6 | 33440519 | 33440537 | SYNGAP1-IVS10- |
| GAAC | | | | | | | 16 |
| AAGGGAGCCATGGC | 61 | AAGGGGGCCAT | 183 | chr6 | 33440524 | 33440542 | SYNGAP1-IVS10- |
| AGAG | | GGCAGAG | | | | | 11 |
| TGAAGAAGGAGGCC | 62 | TGAAGAAGGGG | 184 | chr6 | 33440529 | 33440547 | SYNGAP1-IVS10- |
| ATGG | | GCCATGG | | | | | 6 |
| CTGCTTGAAGAAGA | 63 | CTGCTTGAAGA | 185 | chr6 | 33440534 | 33440552 | SYNGAP1-IVS10- |
| GGGC | | AGGGGGC | | | | | 1 |
| GGAGGCTGCTTGAA | 64 | | | chr6 | 33440539 | 33440557 | SYNGAP1- |
| GAAG | | | | | | | I10AltE11 + 5 |
| AGATGGGAGGCTGC | 65 | | | chr6 | 33440544 | 33440562 | SYNGAP1- |
| TTGA | | | | | | | I10AltE11 + 10 |
| GAGCAAGATGGGAG | 66 | | | chr6 | 33440549 | 33440567 | SYNGAP1- |
| GCTG | | | | | | | I10AltE11 + 15 |
| CAGGAGCAAGATGG | 67 | | | chr6 | 33440552 | 33440570 | SYNGAP1- |
| GAGG | | | | | | | AltEx11 + 1 |
| GACCGCAGGAGCAA | 68 | | | chr6 | 33440557 | 33440575 | SYNGAP1- |
| GATG | | | | | | | AltEx11 + 6 |
| GGAGGGACCGCAGG | 69 | | | chr6 | 33440562 | 33440580 | SYNGAP1- |
| AGCA | | | | | | | AltEx11 + 11 |
| GGGAAGGAGGGACC | 70 | | | chr6 | 33440567 | 33440585 | SYNGAP1- |
| GCAG | | | | | | | AltEx11 + 16 |
| AGACAGGGAAGGAG | 71 | | | chr6 | 33440572 | 33440590 | SYNGAP1- |
| GGAC | | | | | | | AltEx11 + 21 |
| GAGAGAGACAGGGA | 72 | | | chr6 | 33440577 | 33440595 | SYNGAP1- |
| AGGA | | | | | | | AltEx11 + 26 |
| AGGGTGAGAGAGAC | 73 | GGGGTGAGAGA | 186 | chr6 | 33440582 | 33440600 | SYNGAP1- |
| AGGG | | GACAGGG | | | | | AltEx11 + 31 |
| AAACAGGGATGAGA | 74 | AAACAGGGGTG | 187 | chr6 | 33440587 | 33440605 | SYNGAP1- |
| GAGA | | AGAGAGA | | | | | AltEx11 + 36 |
| TGTGGAAACAAGGG | 75 | TGTGGAAACAG | 188 | chr6 | 33440592 | 33440610 | SYNGAP1- |
| TGAG | | GGGTGAG | | | | | AltEx11 + 41 |
| GAGGGTGTGGAAAC | 76 | | | chr6 | 33440597 | 33440615 | SYNGAP1- |
| AGGG | | | | | | | AltEx11 + 46 |
| GAGGTGAGGGTGTG | 77 | | | chr6 | 33440602 | 33440620 | SYNGAP1- |
| GAAA | | | | | | | AltEx11 + 51 |
| GGTAGGAGGTGAGG | 78 | | | chr6 | 33440607 | 33440625 | SYNGAP1- |
| GTGT | | | | | | | AltEx11 + 56 |
| AGGGTGGTAGGAGG | 79 | GGGGTGGTAGG | 189 | chr6 | 33440612 | 33440630 | SYNGAP1- |
| TGAG | | AGGTGAG | | | | | AltEx11 + 61 |
| TGAGGGAGGTGGTA | 80 | TGAGGGGGGTG | 190 | chr6 | 33440617 | 33440635 | SYNGAP1- |
| GGAG | | GTAGGAG | | | | | AltEx11 + 66 |
| CATGCTGAGGAGGG | 81 | CATGCTGAGGG | 191 | chr6 | 33440622 | 33440640 | SYNGAP1- |
| TGGT | | GGGTGGT | | | | | AltEx11 + 71 |
| GGGAACATGCTGAG | 82 | GGGAACATGCT | 192 | chr6 | 33440627 | 33440645 | SYNGAP1- |
| AGGG | | GAGGGGG | | | | | AltEx11 + 76 |
| TTCCAGGGAACATG | 83 | | | chr6 | 33440632 | 33440650 | SYNGAP1- |
| CTGA | | | | | | | AltEx11 + 81 |
| TCAGCTTCCAGGGA | 84 | | | chr6 | 33440637 | 33440655 | SYNGAP1- |
| ACAT | | | | | | | AltEx11 + 86 |
| GGGAGAGAGATGGA | 85 | GGGAGAGAGAT | 193 | chr6 | 33440445 | 33440463 | SYNGAP1-IVS10- |
| TGGG | | GGAGGGG | | | | | 90 |
| TGGGAGAGAGATGG | 86 | | | chr6 | 33440446 | 33440464 | SYNGAP1-IVS10- |
| AGGG | | | | | | | 89 |
| GTGGGAGAGAGATG | 87 | | | chr6 | 33440447 | 33440465 | SYNGAP1-IVS10- |
| GAGG | | | | | | | 88 |
| CGTGGGAGAGAGAT | 88 | | | chr6 | 33440448 | 33440466 | SYNGAP1-IVS10- |
| GGAG | | | | | | | 87 |
| CACGTGGGAGAGAG | 89 | | | chr6 | 33440450 | 33440468 | SYNGAP1-IVS10- |
| ATGG | | | | | | | 85 |
| ACACGTGGGAGAGA | 90 | | | chr6 | 33440451 | 33440469 | SYNGAP1-IVS10- |
| GATG | | | | | | | 84 |
| GACACGTGGGAGAG | 91 | | | chr6 | 33440452 | 33440470 | SYNGAP1-IVS10- |
| AGAT | | | | | | | 83 |
| AGACACGTGGGAGA | 92 | | | chr6 | 33440453 | 33440471 | SYNGAP1-IVS10- |
| GAGA | | | | | | | 82 |
| AGAGACACGTGGGA | 93 | | | chr6 | 33440455 | 33440473 | SYNGAP1-IVS10- |
| GAGA | | | | | | | 80 |
| GAGAGACACGTGGG | 94 | | | chr6 | 33440456 | 33440474 | SYNGAP1-IVS10- |
| AGAG | | | | | | | 79 |
| GGAGAGACACGTGG | 95 | | | chr6 | 33440457 | 33440475 | SYNGAP1-IVS10- |
| GAGA | | | | | | | 78 |
| GGGAGAGACACGTG | 96 | | | chr6 | 33440458 | 33440476 | SYNGAP1-IVS10- |
| GGAG | | | | | | | 77 |
| AGGGAACATGCTGA | 97 | AGGGAACATGC | 194 | chr6 | 33440628 | 33440646 | SYNGAP1- |
| TGGG | | TGAGGGG | | | | | AltEX11 + 77 |
| CAGGGAACATGCTG | 98 | | | chr6 | 33440629 | 33440647 | SYNGAP1- |
| AGGG | | | | | | | AltEX11 + 78 |
| CCAGGGAACATGCT | 99 | | | chr6 | 33440630 | 33440648 | SYNGAP1- |
| GAGG | | | | | | | AltEX11 + 79 |
| TCCAGGGAACATGC | 100 | | | chr6 | 33440631 | 33440649 | SYNGAP1- |
| TGAG | | | | | | | AltEX11 + 80 |
| CTTCCAGGGAACAT | 101 | | | chr6 | 33440633 | 33440651 | SYNGAP1- |
| GCTG | | | | | | | AltEX11 + 82 |
| GCTTCCAGGGAACA | 102 | | | chr6 | 33440634 | 33440652 | SYNGAP1- |
| TGCT | | | | | | | AltEX11 + 83 |
| AGCTTCCAGGGAAC | 103 | | | chr6 | 33440635 | 33440653 | SYNGAP1- |
| ATGC | | | | | | | AltEX11 + 84 |
| CAGCTTCCAGGGAA | 104 | | | chr6 | 33440636 | 33440654 | SYNGAP1- |
| CATG | | | | | | | AltEX11 + 85 |
| GAGACACGTGGGAG | 105 | | | chr6 | 33440456 | 33440472 | SYNGAP1-IVS10- |
| AG | | | | | | | 81(16) |
| GACACGTGGGAGAG | 106 | | | chr6 | 33440454 | 33440470 | SYNGAP1-IVS10- |
| AG | | | | | | | 83(16) |
| CACGTGGGAGAGAG | 107 | | | chr6 | 33440452 | 33440468 | SYNGAP1-IVS10- |
| AT | | | | | | | 85(16) |
| CGTGGGAGAGAGAT | 108 | | | chr6 | 33440450 | 33440466 | SYNGAP1-IVS10- |
| GG | | | | | | | 87(16) |
| GTGGGAGAGAGATG | 109 | | | chr6 | 33440449 | 33440465 | SYNGAP1-IVS10- |
| GA | | | | | | | 88(16) |
| GAGACACGTGGGAG | 110 | | | chr6 | 33440458 | 33440472 | SYNGAP1-IVS10- |
| | | | | | | | 81(14) |
| GACACGTGGGAGAG | 111 | | | chr6 | 33440456 | 33440470 | SYNGAP1-IVS10- |
| | | | | | | | 83(14) |
| CACGTGGGAGAGAG | 112 | | | chr6 | 33440454 | 33440468 | SYNGAP1-IVS10- |
| | | | | | | | 85(14) |
| CGTGGGAGAGAGAT | 113 | | | chr6 | 33440452 | 33440466 | SYNGAP1-IVS10- |
| | | | | | | | 87(14) |
| TGGGAGAGAGATGG | 114 | | | chr6 | 33440450 | 33440464 | SYNGAP1-IVS10- |
| | | | | | | | 89(14) |
| GGGAGAGAGATGGA | 115 | | | chr6 | 33440449 | 33440463 | SYNGAP1-IVS10- |
| | | | | | | | 90(14) |
| GAGACACGTGGG | 116 | | | chr6 | 33440460 | 33440472 | SYNGAP1-IVS10- |
| | | | | | | | 81(12) |
| GACACGTGGGAG | 117 | | | chr6 | 33440458 | 33440470 | SYNGAP1-IVS10- |
| | | | | | | | 83(12) |
| CACGTGGGAGAG | 118 | | | chr6 | 33440456 | 33440468 | SYNGAP1-IVS10- |
| | | | | | | | 85(12) |
| CGTGGGAGAGAG | 119 | | | chr6 | 33440454 | 33440466 | SYNGAP1-IVS10- |
| | | | | | | | 87(12) |
| TGGGAGAGAGAT | 120 | | | chr6 | 33440452 | 33440464 | SYNGAP1-IVS10- |
| | | | | | | | 89(12) |
| GGAGAGAGATGG | 121 | | | chr6 | 33440450 | 33440462 | SYNGAP1-IVS10- |
| | | | | | | | 91(12) |
| GAGAGAGATGGA | 122 | | | chr6 | 33440449 | 33440461 | SYNGAP1-IVS10- |
| | | | | | | | 92(12) |
| CCAGGGAGAGACAG | 123 | | | chr6 | 33440385 | 33440403 | SYNGAP1-IVS10- |
| AGAT | | | | | | | 150 |
| ACCAGGGAGAGACA | 124 | | | chr6 | 33440386 | 33440404 | SYNGAP1-IVS10- |
| GAGA | | | | | | | 149 |
| CACCAGGGAGAGAC | 125 | | | chr6 | 33440387 | 33440405 | SYNGAP1-IVS10- |
| AGAG | | | | | | | 148 |
| ACACCAGGGAGAGA | 126 | | | chr6 | 33440388 | 33440406 | SYNGAP1-IVS10- |
| CAGA | | | | | | | 147 |
| AGACACCAGGGAGA | 127 | | | chr6 | 33440390 | 33440408 | SYNGAP1-IVS10- |
| GACA | | | | | | | 145 |
| CAGACACCAGGGAG | 128 | | | chr6 | 33440391 | 33440409 | SYNGAP1-IVS10- |
| AGAC | | | | | | | 144 |
| ACAGACACCAGGGA | 129 | | | chr6 | 33440392 | 33440410 | SYNGAP1-IVS10- |
| GAGA | | | | | | | 143 |
| AACAGACACCAGGG | 130 | | | chr6 | 33440393 | 33440411 | SYNGAP1-IVS10- |
| AGAG | | | | | | | 142 |
| AAAACAGACACCAG | 131 | | | chr6 | 33440395 | 33440413 | SYNGAP1-IVS10- |
| GGAG | | | | | | | 140 |
| AAAAACAGACACCA | 132 | | | chr6 | 33440396 | 33440414 | SYNGAP1-IVS10- |
| GGGA | | | | | | | 139 |
| GAAAAACAGACACC | 133 | | | chr6 | 33440397 | 33440415 | SYNGAP1-IVS10- |
| AGGG | | | | | | | 138 |
| AGAAAAACAGACAC | 134 | | | chr6 | 33440398 | 33440416 | SYNGAP1-IVS10- |
| CAGG | | | | | | | 137 |
| GAGACAGGGAAGGA | 135 | | | chr6 | 33440573 | 33440591 | SYNGAP1- |
| GGGA | | | | | | | AltEx11 + 22 |
| AGAGACAGGGAAGG | 136 | | | chr6 | 33440574 | 33440592 | SYNGAP1- |
| AGGG | | | | | | | AltEx11 + 23 |
| GAGAGACAGGGAAG | 137 | | | chr6 | 33440575 | 33440593 | SYNGAP1- |
| GAGG | | | | | | | AltEx11 + 24 |
| AGAGAGACAGGGAA | 138 | | | chr6 | 33440576 | 33440594 | SYNGAP1- |
| GGAG | | | | | | | AltEx11 + 25 |
| TGAGAGAGACAGGG | 139 | | | chr6 | 33440578 | 33440596 | SYNGAP1- |
| AAGG | | | | | | | AltEx11 + 27 |
| GTGAGAGAGACAGG | 140 | | | chr6 | 33440579 | 33440597 | SYNGAP1- |
| GAAG | | | | | | | AltEx11 + 28 |
| GGTGAGAGAGACAG | 141 | | | chr6 | 33440580 | 33440598 | SYNGAP1- |
| GGAA | | | | | | | AltEx11 + 29 |
| GGGTGAGAGAGACA | 142 | | | chr6 | 33440581 | 33440599 | SYNGAP1- |
| GGGA | | | | | | | AltEx11 + 30 |
| TTCCAGGGAACATG | 143 | | | chr6 | 33440630 | 33440650 | SYNGAP1- |
| CTGAGG | | | | | | | AltEX11 + 79 |
| AGGGAACATGCTGA | 144 | | | chr6 | 33440630 | 33440646 | SYNGAP1- |
| GG | | | | | | | AltEX11 + 79 |
| CAGGGAACATGCTG | 145 | | | chr6 | 33440631 | 33440647 | SYNGAP1- |
| AG | | | | | | | AltEX11 + 80 |
| CCAGGGAACATGCT | 146 | | | chr6 | 33440632 | 33440648 | SYNGAP1- |
| GA | | | | | | | AltEX11 + 81 |
| TCCAGGGAACATGC | 147 | | | chr6 | 33440633 | 33440649 | SYNGAP1- |
| TG | | | | | | | AltEX11 + 82 |
| TTCCAGGGAACATG | 148 | | | chr6 | 33440634 | 33440650 | SYNGAP1- |
| CT | | | | | | | AltEx11 + 83 |
| CCAGGGAACATGCT | 149 | | | chr6 | 33440630 | 33440648 | SYNGAP1- |
| GAGG | | | | | | | AltEX11 + 79 |
| TCCAGGGAACATGC | 150 | | | chr6 | 33440631 | 33440649 | SYNGAP1- |
| TGAG | | | | | | | AltEX11 + 80 |
| TTCCAGGGAACATG | 151 | | | chr6 | 33440632 | 33440650 | SYNGAP1- |
| CTGA | | | | | | | AltEx11 + 81 |
| AGGGAACATGCTGA | 152 | | | chr6 | 33440630 | 33440646 | SYNGAP1- |
| GG | | | | | | | AltEX11 + 79 |
| CAGGGAACATGCTG | 153 | | | chr6 | 33440631 | 33440647 | SYNGAP1- |
| AG | | | | | | | AltEX11 + 80 |
| CCAGGGAACATGCT | 154 | | | chr6 | 33440632 | 33440648 | SYNGAP1- |
| GA | | | | | | | AltEX11 + 81 |
| TCCAGGGAACATGC | 155 | | | chr6 | 33440633 | 33440649 | SYNGAP1- |
| TG | | | | | | | AltEX11 + 82 |
| TTCCAGGGAACATG | 156 | | | chr6 | 33440634 | 33440650 | SYNGAP1- |
| CT | | | | | | | AltEx11 + 83 |
| CCAGGGAACATGCT | 157 | | | chr6 | 33440630 | 33440648 | SYNGAP1- |
| GAGG | | | | | | | AltEX11 + 79a |
| TCCAGGGAACATGC | 158 | | | chr6 | 33440631 | 33440649 | SYNGAP1- |
| TGAG | | | | | | | AltEX11 + 80a |
| TTCCAGGGAACATG | 159 | | | chr6 | 33440632 | 33440650 | SYNGAP1- |
| CTGA | | | | | | | AltEx11 + 81a |
| AGGGAACATGCTGA | 160 | | | chr6 | 33440630 | 33440646 | SYNGAP1- |
| GG | | | | | | | AltEX11 + 79a |
| CAGGGAACATGCTG | 161 | | | chr6 | 33440631 | 33440647 | SYNGAP1- |
| AG | | | | | | | AltEX11 + 80a |
| CCAGGGAACATGCT | 162 | | | chr6 | 33440632 | 33440648 | SYNGAP1- |
| GA | | | | | | | AltEX11 + 81a |
| TCCAGGGAACATGC | 163 | | | chr6 | 33440633 | 33440649 | SYNGAP1- |
| TG | | | | | | | AltEX11 + 82a |
| TTCCAGGGAACATG | 164 | | | chr6 | 33440634 | 33440650 | SYNGAP1- |
| CT | | | | | | | AltEx11 + 83a |
| CAGACACCAGGGAG | 165 | | | chr6 | 33440389 | 33440409 | SYNGAP1-IVS10- |
| AGACAG | | | | | | | 146(20) |
| ACAGACACCAGGGA | 166 | | | chr6 | 33440389 | 33440410 | SYNGAP1-IVS10- |
| GAGACAG | | | | | | | 146(21) |
| AACAGACACCAGGG | 167 | | | chr6 | 33440389 | 33440411 | SYNGAP1-IVS10- |
| AGAGACAG | | | | | | | 146(22) |
| AAACAGACACCAGG | 168 | | | chr6 | 33440389 | 33440412 | SYNGAP1-IVS10- |
| GAGAGACAG | | | | | | | 146(23) |
| CAGACACCAGGGAG | 169 | | | chr6 | 33440389 | 33440409 | SYNGAP1-IVS10- |
| AGACAG | | | | | | | 146(20)-P |
| ACAGACACCAGGGA | 170 | | | chr6 | 33440389 | 33440410 | SYNGAP1-IVS10- |
| GAGACAG | | | | | | | 146(21)-P |
| AACAGACACCAGGG | 171 | | | chr6 | 33440389 | 33440411 | SYNGAP1-IVS10- |
| AGAGACAG | | | | | | | 146(22)-P |
| AAACAGACACCAGG | 172 | | | chr6 | 33440389 | 33440412 | SYNGAP1-IVS10- |
| GAGAGACAG | | | | | | | 146(23)-P |
| ATGGGAGAGAGATG | 30 | | | chr6 | 33440369 | 33440387 | SYNGAP1-IVS10- |
| GAGG | | | | | | | 166 |
| CAGAGATGGGAGAG | 31 | | | chr6 | 33440374 | 33440392 | SYNGAP1-IVS10- |
| AGAT | | | | | | | 161 |
| AGAGACAGAGATGG | 32 | | | chr6 | 33440379 | 33440397 | SYNGAP1-IVS10- |
| GAGA | | | | | | | 156 |
| CAGGGAGAGACAGA | 33 | | | chr6 | 33440384 | 33440402 | SYNGAP1-IVS10- |
| GATG | | | | | | | 151 |
| GACACCAGGGAGAG | 34 | | | chr6 | 33440389 | 33440407 | SYNGAP1-IVS10- |
| ACAG | | | | | | | 146 |
| AAACAGACACCAGG | 35 | | | chr6 | 33440394 | 33440412 | SYNGAP1-IVS10- |
| GAGA | | | | | | | 141 |
| AAGAAAAACAGACA | 36 | | | chr6 | 33440399 | 33440417 | SYNGAP1-IVS10- |
| CCAG | | | | | | | 136 |
| AGGAGAAGAAAAAC | 37 | | | chr6 | 33440404 | 33440422 | SYNGAP1-IVS10- |
| AGAC | | | | | | | 131 |
| AGAGGAGGAGAAGA | 38 | | | chr6 | 33440409 | 33440427 | SYNGAP1-IVS10- |
| AAAA | | | | | | | 126 |
| CAAGGAGAGGAGGA | 39 | | | chr6 | 33440414 | 33440432 | SYNGAP1-IVS10- |
| GAAG | | | | | | | 121 |
| AGAGACAAGGAGAG | 40 | | | chr6 | 33440419 | 33440437 | SYNGAP1-IVS10- |
| GAGG | | | | | | | 116 |
| GGGAGAGAGACAAG | 41 | | | chr6 | 33440424 | 33440442 | SYNGAP1-IVS10- |
| GAGA | | | | | | | 111 |
| GGTGTGGGAGAGAG | 42 | | | chr6 | 33440429 | 33440447 | SYNGAP1-IVS10- |
| ACAA | | | | | | | 106 |
| GGAGGGTTGTGGGA | 43 | | | chr6 | 33440434 | 33440452 | SYNGAP1-IVS10- |
| GAGA | | | | | | | 101 |
| GAGATGGATGGGTG | 44 | | | chr6 | 33440439 | 33440457 | SYNGAP1-IVS10- |
| TGGG | | | | | | | 96 |
| GGAGAGAGATGGAT | 45 | | | chr6 | 33440444 | 33440462 | SYNGAP1-IVS10- |
| GGGT | | | | | | | 91 |
| ACGTGGGAGAGAGA | 46 | | | chr6 | 33440449 | 33440467 | SYNGAP1-IVS10- |
| TGGA | | | | | | | 86 |
| GAGACACGTGGGAG | 47 | | | chr6 | 33440454 | 33440472 | SYNGAP1-IVS10- |
| AGAG | | | | | | | 81 |
| AGGGAGAGACACGT | 48 | | | chr6 | 33440459 | 33440477 | SYNGAP1-IVS10- |
| GGGA | | | | | | | 76 |
| GGTGAGGGAAGAGA | 49 | | | chr6 | 33440464 | 33440482 | SYNGAP1-IVS10- |
| CACG | | | | | | | 71 |
| GAGAAGGTGAAGGG | 50 | | | chr6 | 33440469 | 33440487 | SYNGAP1-IVS10- |
| AGAG | | | | | | | 66 |
| AGGGAGAGAAGGTG | 51 | | | chr6 | 33440474 | 33440492 | SYNGAP1-IVS10- |
| AGGG | | | | | | | 61 |
| TGGAGGGAGAGAGA | 52 | | | chr6 | 33440479 | 33440497 | SYNGAP1-IVS10- |
| AGGT | | | | | | | 56 |
| AGAAATGGAGAGGG | 53 | | | chr6 | 33440484 | 33440502 | SYNGAP1-IVS10- |
| AGAG | | | | | | | 51 |
| GAGAGAGAAATGGA | 54 | | | chr6 | 33440489 | 33440507 | SYNGAP1-IVS10- |
| GGGA | | | | | | | 46 |
| TTAGGGAGAGAGAA | 55 | | | chr6 | 33440494 | 33440512 | SYNGAP1-IVS10- |
| ATGG | | | | | | | 41 |
| ACAGATTAGGGAGA | 56 | | | chr6 | 33440499 | 33440517 | SYNGAP1-IVS10- |
| GAGA | | | | | | | 36 |
| AACAGACAGATTAG | 57 | | | chr6 | 33440504 | 33440522 | SYNGAP1-IVS10- |
| GGAG | | | | | | | 31 |
| GAGGGAACAGACAG | 58 | | | chr6 | 33440509 | 33440527 | SYNGAP1-IVS10- |
| ATTA | | | | | | | 26 |
| TGGCAGAGGGAACA | 59 | | | chr6 | 33440514 | 33440532 | SYNGAP1-IVS10- |
| GACA | | | | | | | 21 |
| GGCCATGGCAGAGG | 60 | | | chr6 | 33440519 | 33440537 | SYNGAP1-IVS10- |
| GAAC | | | | | | | 16 |
| AAGGGAGCCATGGC | 61 | | | chr6 | 33440524 | 33440542 | SYNGAP1-IVS10- |
| AGAG | | | | | | | 11 |
| TGAAGAAGGAGGCC | 62 | | | chr6 | 33440529 | 33440547 | SYNGAP1-IVS10- |
| ATGG | | | | | | | 6 |
| CTGCTTGAAGAAGA | 63 | | | chr6 | 33440534 | 33440552 | SYNGAP1-IVS10- |
| GGGC | | | | | | | 1 |
| GGAGGCTGCTTGAA | 64 | | | chr6 | 33440539 | 33440557 | SYNGAP1- |
| GAAG | | | | | | | I10AltE11 + 5 |
| AGATGGGAGGCTGC | 65 | | | chr6 | 33440544 | 33440562 | SYNGAP1- |
| TTGA | | | | | | | I10AltE11 + 10 |
| GAGCAAGATGGGAG | 66 | | | chr6 | 33440549 | 33440567 | SYNGAP1- |
| GCTG | | | | | | | I10AltE11 + 15 |
| CAGGAGCAAGATGG | 67 | | | chr6 | 33440554 | 33440572 | SYNGAP1- |
| GAGG | | | | | | | AltEx11 + 1 |
| GACCGCAGGAGCAA | 68 | | | chr6 | 33440559 | 33440577 | SYNGAP1- |
| GATG | | | | | | | AltEx11 + 6 |
| GGAGGGACCGCAGG | 69 | | | chr6 | 33440564 | 33440582 | SYNGAP1- |
| AGCA | | | | | | | AltEx11 + 11 |
| GGGAAGGAGGGACC | 70 | | | chr6 | 33440569 | 33440587 | SYNGAP1- |
| GCAG | | | | | | | AltEx11 + 16 |
| AGACAGGGAAGGAG | 71 | | | chr6 | 33440574 | 33440592 | SYNGAP1- |
| GGAC | | | | | | | AltEx11 + 21 |
| GAGAGAGACAGGGA | 72 | | | chr6 | 33440579 | 33440597 | SYNGAP1- |
| AGGA | | | | | | | AltEx11 + 26 |
| AGGGTGAGAGAGAC | 73 | | | chr6 | 33440584 | 33440602 | SYNGAP1- |
| AGGG | | | | | | | AltEx11 + 31 |
| AAACAGGGATGAGA | 74 | | | chr6 | 33440589 | 33440607 | SYNGAP1- |
| GAGA | | | | | | | AltEx11 + 36 |
| TGTGGAAACAAGGG | 75 | | | chr6 | 33440594 | 33440612 | SYNGAP1- |
| TGAG | | | | | | | AltEx11 + 41 |
| GAGGGTGTGGAAAC | 76 | | | chr6 | 33440599 | 33440617 | SYNGAP1- |
| AGGG | | | | | | | AltEx11 + 46 |
| GAGGTGAGGGTGTG | 77 | | | chr6 | 33440604 | 33440622 | SYNGAP1- |
| GAAA | | | | | | | AltEx11 + 51 |
| GGTAGGAGGTGAGG | 78 | | | chr6 | 33440609 | 33440627 | SYNGAP1- |
| GTGT | | | | | | | AltEx11 + 56 |
| AGGGTGGTAGGAGG | 79 | | | chr6 | 33440614 | 33440632 | SYNGAP1- |
| TGAG | | | | | | | AltEx11 + 61 |
| TGAGGGAGGTGGTA | 80 | | | chr6 | 33440619 | 33440637 | SYNGAP1- |
| GGAG | | | | | | | AltEx11 + 66 |
| CATGCTGAGGAGGG | 81 | | | chr6 | 33440624 | 33440642 | SYNGAP1- |
| TGGT | | | | | | | AltEx11 + 71 |
| GGGAACATGCTGAG | 82 | | | chr6 | 33440629 | 33440647 | SYNGAP1- |
| AGGG | | | | | | | AltEx11 + 76 |
| TTCCAGGGAACATG | 83 | | | chr6 | 33440634 | 33440652 | SYNGAP1- |
| CTGA | | | | | | | AltEx11 + 81 |
| TCAGCTTCCAGGGA | 84 | | | chr6 | 33440639 | 33440657 | SYNGAP1- |
| ACAT | | | | | | | AltEx11 + 86 |
| GGGAGAGAGATGGA | 85 | | | chr6 | 33408222 | 33408239 | SYNGAP1-IVS10- |
| TGGG | | | | | | | 90 |
| TGGGAGAGAGATGG | 86 | | | chr6 | 33408223 | 33408240 | SYNGAP1-IVS10- |
| AGGG | | | | | | | 89 |
| GTGGGAGAGAGATG | 87 | | | chr6 | 33408224 | 33408241 | SYNGAP1-IVS10- |
| GAGG | | | | | | | 88 |
| CGTGGGAGAGAGAT | 88 | | | chr6 | 33408225 | 33408242 | SYNGAP1-IVS10- |
| GGAG | | | | | | | 87 |
| CACGTGGGAGAGAG | 89 | | | chr6 | 33408227 | 33408244 | SYNGAP1-IVS10- |
| ATGG | | | | | | | 85 |
| ACACGTGGGAGAGA | 90 | | | chr6 | 33408228 | 33408245 | SYNGAP1-IVS10- |
| GATG | | | | | | | 84 |
| GACACGTGGGAGAG | 91 | | | chr6 | 33408229 | 33408246 | SYNGAP1-IVS10- |
| AGAT | | | | | | | 83 |
| AGACACGTGGGAGA | 92 | | | chr6 | 33408230 | 33408247 | SYNGAP1-IVS10- |
| GAGA | | | | | | | 82 |
| AGAGACACGTGGGA | 93 | | | chr6 | 33408232 | 33408249 | SYNGAP1-IVS10- |
| GAGA | | | | | | | 80 |
| GAGAGACACGTGGG | 94 | | | chr6 | 33408233 | 33408250 | SYNGAP1-IVS10- |
| AGAG | | | | | | | 79 |
| GGAGAGACACGTGG | 95 | | | chr6 | 33408234 | 33408251 | SYNGAP1-IVS10- |
| GAGA | | | | | | | 78 |
| GGGAGAGACACGTG | 96 | | | chr6 | 33408235 | 33408252 | SYNGAP1-IVS10- |
| GGAG | | | | | | | 77 |
| AGGGAACATGCTGA | 97 | | | chr6 | 33408405 | 33408422 | SYNGAP1- |
| TGGG | | | | | | | AltEX11 + 77 |
| CAGGGAACATGCTG | 98 | | | chr6 | 33408406 | 33408423 | SYNGAP1- |
| AGGG | | | | | | | AltEX11 + 78 |
| CCAGGGAACATGCT | 99 | | | chr6 | 33408407 | 33408424 | SYNGAP1- |
| GAGG | | | | | | | AltEX11 + 79 |
| TCCAGGGAACATGC | 100 | | | chr6 | 33408408 | 33408425 | SYNGAP1- |
| TGAG | | | | | | | AltEX11 + 80 |
| CTTCCAGGGAACAT | 101 | | | chr6 | 33408410 | 33408427 | SYNGAP1- |
| GCTG | | | | | | | AltEX11 + 82 |
| GCTTCCAGGGAACA | 102 | | | chr6 | 33408411 | 33408428 | SYNGAP1- |
| TGCT | | | | | | | AltEX11 + 83 |
| AGCTTCCAGGGAAC | 103 | | | chr6 | 33408412 | 33408429 | SYNGAP1- |
| ATGC | | | | | | | AltEX11 + 84 |
| CAGCTTCCAGGGAA | 104 | | | chr6 | 33408413 | 33408430 | SYNGAP1- |
| CATG | | | | | | | AltEX11 + 85 |
| GAGACACGTGGGAG | 105 | | | chr6 | 33408233 | 33408248 | SYNGAP1-IVS10- |
| AG | | | | | | | 81(16) |
| GACACGTGGGAGAG | 106 | | | chr6 | 33408231 | 33408246 | SYNGAP1-IVS10- |
| AG | | | | | | | 83(16) |
| CACGTGGGAGAGAG | 107 | | | chr6 | 33408229 | 33408244 | SYNGAP1-IVS10- |
| AT | | | | | | | 85(16) |
| CGTGGGAGAGAGAT | 108 | | | chr6 | 33408227 | 33408242 | SYNGAP1-IVS10- |
| GG | | | | | | | 87(16) |
| GTGGGAGAGAGATG | 109 | | | chr6 | 33408226 | 33408241 | SYNGAP1-IVS10- |
| GA | | | | | | | 88(16) |
| GAGACACGTGGGAG | 110 | | | chr6 | 33408235 | 33408248 | SYNGAP1-IVS10- |
| | | | | | | | 81(14) |
| GACACGTGGGAGAG | 111 | | | chr6 | 33408233 | 33408246 | SYNGAP1-IVS10- |
| | | | | | | | 83(14) |
| CACGTGGGAGAGAG | 112 | | | chr6 | 33408231 | 33408244 | SYNGAP1-IVS10- |
| | | | | | | | 85(14) |
| CGTGGGAGAGAGAT | 113 | | | chr6 | 33408229 | 33408242 | SYNGAP1-IVS10- |
| | | | | | | | 87(14) |
| TGGGAGAGAGATGG | 114 | | | chr6 | 33408227 | 33408240 | SYNGAP1-IVS10- |
| | | | | | | | 89(14) |
| GGGAGAGAGATGGA | 115 | | | chr6 | 33408226 | 33408239 | SYNGAP1-IVS10- |
| | | | | | | | 90(14) |
| GAGACACGTGGG | 116 | | | chr6 | 33408237 | 33408248 | SYNGAP1-IVS10- |
| | | | | | | | 81(12) |
| GACACGTGGGAG | 117 | | | chr6 | 33408235 | 33408246 | SYNGAP1-IVS10- |
| | | | | | | | 83(12) |
| CACGTGGGAGAG | 118 | | | chr6 | 33408233 | 33408244 | SYNGAP1-IVS10- |
| | | | | | | | 85(12) |
| CGTGGGAGAGAG | 119 | | | chr6 | 33408231 | 33408242 | SYNGAP1-IVS10- |
| | | | | | | | 87(12) |
| TGGGAGAGAGAT | 120 | | | chr6 | 33408229 | 33408240 | SYNGAP1-IVS10- |
| | | | | | | | 89(12) |
| GGAGAGAGATGG | 121 | | | chr6 | 33408227 | 33408238 | SYNGAP1-IVS10- |
| | | | | | | | 91(12) |
| GAGAGAGATGGA | 122 | | | chr6 | 33408226 | 33408237 | SYNGAP1-IVS10- |
| | | | | | | | 92(12) |

TABLE 2
Exemplary ASOs targeting NMD Exon 18x event

| ASO | | | | | |
|---|---|---|---|---|---|
| (Bold = 2' MOE, | | | | | |
| Italicized = | | | | | |
| 2' O-Me, | | | | | |
| Underlined C = | | | | | |
| Bold and | | | | | |
| italicized = | | | | | |
| 5methylC | | | | | |
| Bold and | | | | | |
| italicized = | | Genomic Coordinates | | | |
| 2'-Fluoro) | SEQ ID | (GRCh38/hg38) | | | Name |
| Sequence 5'-3' | NO: | Chr | Start | End | Position ID |
| AGGAGTATGGGT | 195 | chr6 | 33448685 | 33448703 | SYNGAP1:NM 006772:IVS17: |
| AGGAAA | | | | | -86 |
| CAAAGAGGAGTAT | 196 | chr6 | 33448690 | 33448708 | SYNGAP1:NM 006772:IVS17: |
| GGGTA | | | | | -81 |
| CAGAGCAAAGAG | 197 | chr6 | 33448695 | 33448713 | SYNGAP1:NM 006772:IVS17: |
| GAGTAT | | | | | -76 |
| GCAGTCAGAGCA | 198 | chr6 | 33448700 | 33448718 | SYNGAP1:NM 006772:IVS17: |
| AAGAGG | | | | | -71 |
| GCCTAGCAGTCAG | 199 | chr6 | 33448705 | 33448723 | SYNGAP1:NM 006772:IVS17: |
| AGCAA | | | | | -66 |
| GGGGAGCCTAGC | 200 | chr6 | 33448710 | 33448728 | SYNGAP1:NM_006772:IVS17: |
| AGTCAG | | | | | -61 |
| GGCGGGGGGAGC | 201 | chr6 | 33448715 | 33448733 | SYNGAP1:NM_006772:IVS17: |
| CTAGCA | | | | | -56 |
| TGGCAGGCGGGG | 202 | chr6 | 33448720 | 33448738 | SYNGAP1:NM 006772:IVS17: |
| GGAGCC | | | | | -51 |
| GGGGATGGCAGG | 203 | chr6 | 33448725 | 33448743 | SYNGAP1:NM_006772:IVS17: |
| CGGGGG | | | | | -46 |
| GGTGGGGGGATG | 204 | chr6 | 33448730 | 33448748 | SYNGAP1:NM 006772:IVS17: |
| GCAGGC | | | | | -41 |
| GCCTTGGTGGGG | 205 | chr6 | 33448735 | 33448753 | SYNGAP1:NM_006772:IVS17: |
| GGATGG | | | | | -36 |
| CAGGAGCCTTGGT | 206 | chr6 | 33448740 | 33448758 | SYNGAP1:NM_006772:IVS17: |
| GGGGG | | | | | -31 |
| GGGGTCAGGAGC | 207 | chr6 | 33448745 | 33448763 | SYNGAP1:NM_006772:IVS17: |
| CTTGGT | | | | | -26 |
| GTCATGGGGTCA | 208 | chr6 | 33448750 | 33448768 | SYNGAP1:NM_006772:IVS17: |
| GGAGCC | | | | | -21 |
| GTGGGGTCATGG | 209 | chr6 | 33448755 | 33448773 | SYNGAP1:NM 006772:IVS17: |
| GGTCAG | | | | | -16 |
| AGAGAGTGGGGT | 210 | chr6 | 33448760 | 33448778 | SYNGAP1:NM 006772:IVS17: |
| CATGGG | | | | | -11 |
| GTGGGAGAGAGT | 211 | chr6 | 33448765 | 33448783 | SYNGAP1:NM_006772:IVS17: |
| GGGGTC | | | | | -6 |
| CTGCAGTGGGAG | 212 | chr6 | 33448770 | 33448788 | SYNGAP1:NM_006772:IVS17: |
| AGAGTG | | | | | -1 |
| AGGAGCTGCAGT | 213 | chr6 | 33448775 | 33448793 | SYNGAP1:NM_006772:IVS17- |
| GGGAGA | | | | | EX18x:+5 |
| TGATGAGGAGCT | 214 | chr6 | 33448780 | 33448798 | SYNGAP1:NM_006772:IVS17- |
| GCAGTG | | | | | EX18x:+10 |
| TTACCTGATGAGG | 215 | chr6 | 33448785 | 33448803 | SYNGAP1:NM 006772:IVS17- |
| AGCTG | | | | | EX18x:+15 |
| GAATTACCTGATG | 216 | chr6 | 33448788 | 33448806 | SYNGAP1:NM_006772:EX18x: |
| AGGAG | | | | | +1 |
| CAGGAGAATTACC | 217 | chr6 | 33448793 | 33448811 | SYNGAP1:NM 006772:EX18x: |
| TGATG | | | | | +6 |
| GGAACCAGGAGA | 218 | chr6 | 33448798 | 33448816 | SYNGAP1:NM 006772:EX18x: |
| ATTACC | | | | | +11 |
| AAAGCGGAACCA | 219 | chr6 | 33448803 | 33448821 | SYNGAP1:NM 006772:EX18x: |
| GGAGAA | | | | | +16 |
| TGGCCAAAGCGG | 220 | chr6 | 33448808 | 33448826 | SYNGAP1:NM 006772:EX18x: |
| AACCAG | | | | | +21 |
| GCCCGTGGCCAA | 221 | chr6 | 33448813 | 33448831 | SYNGAP1:NM 006772:EX18x: |
| AGCGGA | | | | | +26 |
| CCTCCGCCCGTGG | 222 | chr6 | 33448818 | 33448836 | SYNGAP1:NM_006772:EX18x: |
| CCAAA | | | | | +31 |
| CCTGTGTCCTCCG | 223 | chr6 | 33448825 | 33448843 | SYNGAP1:NM 006772:EX18x: |
| CCCGT | | | | | -26 |
| CTCCCCCTGTGTC | 224 | chr6 | 33448830 | 33448848 | SYNGAP1:NM_006772:EX18x: |
| CTCCG | | | | | -21 |
| GTCACCTCCCCCT | 225 | chr6 | 33448835 | 33448853 | SYNGAP1:NM_006772:EX18x: |
| GTGTC | | | | | -16 |
| CCGGAGTCACCTC | 226 | chr6 | 33448840 | 33448858 | SYNGAP1:NM_006772:EX18x: |
| CCCCT | | | | | -11 |
| GTGGTCCGGAGT | 227 | chr6 | 33448845 | 33448863 | SYNGAP1:NM_006772:EX18x: |
| CACCTC | | | | | -6 |
| CTGCAGTGGTCCG | 228 | chr6 | 33448850 | 33448868 | SYNGAP1:NM_006772:EX18x: |
| GAGTC | | | | | -1 |
| AACCTGCAGTGGT | 229 | chr6 | 33448853 | 33448871 | SYNGAP1:NM_006772:EX18x- |
| CCGGA | | | | | IVS18:-15 |
| CGACCAACCTGCA | 230 | chr6 | 33448858 | 33448876 | SYNGAP1:NM_006772:EX18x- |
| GTGGT | | | | | IVS18:-10 |
| CTTCACGACCAAC | 231 | chr6 | 33448863 | 33448881 | SYNGAP1:NM_006772:EX18x- |
| CTGCA | | | | | IVS18:-5 |
| GTGGGCTTCACGA | 232 | chr6 | 33448868 | 33448886 | SYNGAP1:NM_006772:IVS18: |
| CCAAC | | | | | +1 |
| AGGGAGTGGGCT | 233 | chr6 | 33448873 | 33448891 | SYNGAP1:NM_006772:IVS18: |
| TCACGA | | | | | +6 |
| GTTGGAGGGAGT | 234 | chr6 | 33448878 | 33448896 | SYNGAP1:NM_006772:IVS18: |
| GGGCTT | | | | | +11 |
| GAGGTGTTGGAG | 235 | chr6 | 33448883 | 33448901 | SYNGAP1:NM 006772:IVS18: |
| GGAGTG | | | | | +16 |
| CTCCGGAGGTGTT | 236 | chr6 | 33448888 | 33448906 | SYNGAP1:NM 006772:IVS18: |
| GGAGG | | | | | +21 |
| AGAGGCTCCGGA | 237 | chr6 | 33448893 | 33448911 | SYNGAP1:NM_006772:IVS18: |
| GGTGTT | | | | | +26 |
| AGGGGAGAGGCT | 238 | chr6 | 33448898 | 33448916 | SYNGAP1:NM_006772:IVS18: |
| CCGGAG | | | | | +31 |
| GTGAGAGGGGAG | 239 | chr6 | 33448903 | 33448921 | SYNGAP1:NM_006772:IVS18: |
| AGGCTC | | | | | +36 |
| CAGCAGTGAGAG | 240 | chr6 | 33448908 | 33448926 | SYNGAP1:NM_006772:IVS18: |
| GGGAGA | | | | | +41 |
| GAGGGCAGCAGT | 241 | chr6 | 33448913 | 33448931 | SYNGAP1:NM_006772:IVS18: |
| GAGAGG | | | | | +46 |
| GTGTGGAGGGCA | 242 | chr6 | 33448918 | 33448936 | SYNGAP1:NM_006772:IVS18: |
| GCAGTG | | | | | +51 |
| TCTGGGTGTGGA | 243 | chr6 | 33448923 | 33448941 | SYNGAP1:NM_006772:IVS18: |
| GGGCAG | | | | | +56 |
| GGTTCTCTGGGTG | 244 | chr6 | 33448928 | 33448946 | SYNGAP1:NM 006772:IVS18: |
| TGGAG | | | | | +61 |
| GTGGAGGTTCTCT | 245 | chr6 | 33448933 | 33448951 | SYNGAP1:NM_006772:IVS18: |
| GGGTG | | | | | +66 |
| AGTCTGTGGAGGT | 246 | chr6 | 33448938 | 33448956 | SYNGAP1:NM_006772:IVS18: |
| TCTCT | | | | | +71 |
| GCTGGAGTCTGTG | 247 | chr6 | 33448943 | 33448961 | SYNGAP1:NM_006772:IVS18: |
| GAGGT | | | | | +76 |
| GGAGGGCTGGAG | 248 | chr6 | 33448948 | 33448966 | SYNGAP1:NM_006772:IVS18: |
| TCTGTG | | | | | +81 |
| GTGTCGGAGGGC | 249 | chr6 | 33448953 | 33448971 | SYNGAP1:NM 006772:IVS18: |
| TGGAGT | | | | | +86 |
| AAAGCGGAACCA | 250 | chr6 | 33448808 | 33448821 | |
| G | | | | | |
| CAAAGCGGAACC | 251 | chr6 | 33448808 | 33448822 | |
| AG | | | | | |
| CCAAAGCGGAAC | 252 | chr6 | 33448808 | 33448823 | |
| CAG | | | | | |
| GCCAAAGCGGAA | 253 | chr6 | 33448808 | 33448824 | |
| CCAG | | | | | |
| GCCAAAGCG7dGA | 254 | chr6 | 33448808 | 33448824 | |
| ACCAG | | | | | |
| GCCAAAGCGGAA | 255 | chr6 | 33448808 | 33448824 | |
| CCAG | | | | | |
| GCCAAAGCGGAA | 256 | chr6 | 33448808 | 33448824 | |
| CCAG | | | | | |
| GCCAAAGCGGAA | 257 | chr6 | 33448808 | 33448824 | |
| CCAG | | | | | |
| GCCAAAGCGGAA | 258 | chr6 | 33448808 | 33448824 | |
| CCAG | | | | | |
| GCCAAAGCGGAA | 259 | chr6 | 33448808 | 33448824 | |
| CCAG | | | | | |
| GCCAAAGCGGAA | 260 | chr6 | 33448808 | 33448824 | |
| CCAG | | | | | |
| CTTCACGACCAAC | 261 | chr6 | 33448865 | 33448881 | |
| CTG | | | | | |
| CTTCACGACCAAC | 262 | chr6 | 33448866 | 33448881 | |
| CT | | | | | |
| CTTCACGACCAAC | 263 | chr6 | 33448867 | 33448881 | |
| C | | | | | |
| CTTCACGACCAAC | 264 | chr6 | 33448868 | 33448881 | |
| TCACGACCAACCT | 265 | chr6 | 33448863 | 33448879 | |
| GCA | | | | | |
| GGCTTCACGACCA | 266 | chr6 | 33448868 | 33448883 | |
| AC | | | | | |
| GCTTCACGACCAA | 267 | chr6 | 33448868 | 33448882 | |
| C | | | | | |
| CTTCACGACCAAC | 268 | chr6 | 33448863 | 33448881 | SYNGAP1:NM_006772:EX18x- |
| CTGCA | | | | | IVS18:-5 |
| CTTCACGACCAAC | 269 | chr6 | 33448863 | 33448881 | SYNGAP1:NM_006772:EX18x- |
| CTGCA | | | | | IVS18:-5 |
| CTTCACGACCAAC | 270 | chr6 | 33448863 | 33448881 | SYNGAP1:NM_006772:EX18x- |
| CT7dGCA | | | | | IVS18:-5 |
| CTTCACGACCAAC | 271 | chr6 | 33448863 | 33448881 | SYNGAP1:NM_006772:EX18x- |
| CTGCA | | | | | IVS18:-5 |
| CUTCACGACCAAC | 272 | chr6 | 33448863 | 33448881 | SYNGAP1:NM 006772:EX18x- |
| CTGCA | | | | | IVS18:-5 |
| CTTCACGACCAAC | 273 | chr6 | 33448863 | 33448881 | SYNGAP1:NM_006772:EX18x- |
| CTGCA | | | | | IVS18:-5 |
| CTTCACCACCAAC | 274 | chr17 | 26967755 | 26967773 | |
| CTGCA | | | | | |
| GTCAAAGCGGAA | 275 | chr17 | 26967700 | 26967716 | |
| CCAG | | | | | |

TABLE 3
SYNGAP1 sequences related to NSAE event
SYNGAP1

| | |
|---|---|
| Canonical intron | gtgagactgggaacgctgggctggggggccagggtcgggggaattatgtgttcatctgttcatctatctgtcc |
| chr6: 33438919- | atcctcaaagaggactgagcaccatttatgggcaaagcattgttctaggcgctatagagcaaacaggtgaaa |
| 33440728 | gaggcctggtccctgccctcagagggcctccaccagaatggggacaaattagaagaaaaaaaaaaaaagc |
| | cacagagccataatggtgtgtaagtgctgagtaagggtccccccaacctctgtgtgacataaggtcagagag |
| | aaggcagagctttgagataagtggggaagaggtgcccccttgggtaggctttgaagactggtttaggttctga |
| | tatatggacatagttggcaagaaagacatttcagaagaaggctgtgagaaaggcacatgtgtgatggtgaaa |
| | aggcccaggagttttcaggggacattaaagtaggttagtagcaattacatcaggtttagtggagcatgtgcctc |
| | ataatggggagtggcgggagagatgtctgggcaggaagattagctttagaaactggaaggcctcaaggagt |
| | ctgaggtcattggtaggccttgggatgccattaaaggtgtcagaaatattgtgatttagaagattaatccatagg |
| | ctgggcacggtggctcacacctgtaataccagcactttgggaggctgaggcgggcagaccacctgaggtca |
| | ggagtttgagaccaggctgaccaacatggagaaaccctgtctctactaaaaatacaaaattagccagatgtgg |
| | tggcacatgcctgtaatcccagctattcgggaggctaaggcaggagaatcacttgaatctgggaggtggag |
| | gttgtagtgagccgagatcacacgattgcactctagcctgggcaacaagagtgaaactccatctcaaaaaaa |
| | aaaaattaatccataagtagagtgtatgtagtagagtagagggatgtatgttgggggatgactggaatagagc |
| | cagctgggggctcggaggcatgaaagtcagatcctgaatcagaacagtgacagaagttaggaaggagcta |
| | ctggaaggaccctctcgggaaaggatcagtaggaattgtcagcttattggaaaggagggagcatgtctgtgg |
| | ggagtcacggatgactcaagaggccatgaggctggtggttgggagaccggtggcctcattgacaaccagg |
| | aaagtcaggaggaggagccagttggaggtgtgggggcgatggtgagctctgctttacaccagccgagttta |
| | aggtgtcagtgggacattgaagtggaactgggaggtgcggggagtgagctctgagccattccagggactg |
| | gggatcatgcctggggcacctccatccccatttccctggaatccagaagagttggggggtccgagctccctg |
| | tacctcaagtgaccctccatctctctcccatctctgtctctccctggtgtctgtttttcttctcctcctctccttgtctct |
| | ctcccacacccctccatctctctcccacgtgtctctcccctcaccttctctccccctccatttctctctccctaatct |
| | gtctgttccctctgccatggcccccttcttcaagcagcctcccatcttgctcctgcggtccctccttccctgtctct |
| | ctcacccctgtttccacaccctcacctcctaccacccccctcagcatgttccctggaagctgagggtctctggg |
| | gctcagtcccggtctctctctttctctctctctctctctgtctccccgacccttccccccag (SEQ ID NO: |
| | 276) |
| Alternative intron | gtgagactgggaacgctgggctggggggccagggtcgggggaattatgtgttcatctgttcatctatctgtcc |
| chr6: 33438919- | atcctcaaagaggactgagcaccatttatgggcaaagcattgttctaggcgctatagagcaaacaggtgaaa |
| 33440552 | gaggcctggtccctgccctcagagggcctccaccagaatggggacaaattagaagaaaaaaaaaaaaagc |
| | cacagagccataatggtgtgtaagtgctgagtaagggtccccccaacctctgtgtgacataaggtcagagag |
| | aaggcagagctttgagataagtggggaagaggtgcccccttgggtaggctttgaagactggtttaggttctga |
| | tatatggacatagttggcaagaaagacatttcagaagaaggctgtgagaaaggcacatgtgtgatggtgaaa |
| | aggcccaggagttttcaggggacattaaagtaggttagtagcaattacatcaggtttagtggagcatgtgcctc |
| | ataatggggagtggcgggagagatgtctgggcaggaagattagctttagaaactggaaggcctcaaggagt |
| | ctgaggtcattggtaggccttgggatgccattaaaggtgtcagaaatattgtgatttagaagattaatccatagg |
| | ctgggcacggtggctcacacctgtaataccagcactttgggaggctgaggcgggcagaccacctgaggtca |
| | ggagtttgagaccaggctgaccaacatggagaaaccctgtctctactaaaaatacaaaattagccagatgtgg |
| | tggcacatgcctgtaatcccagctattcgggaggctaaggcaggagaatcacttgaatctgggaggtggag |
| | gttgtagtgagccgagatcacacgattgcactctagcctgggcaacaagagtgaaactccatctcaaaaaaa |
| | aaaaattaatccataagtagagtgtatgtagtagagtagagggatgtatgttgggggatgactggaatagagc |
| | cagctgggggctcggaggcatgaaagtcagatcctgaatcagaacagtgacagaagttaggaaggagcta |
| | ctggaaggaccctctcgggaaaggatcagtaggaattgtcagcttattggaaaggagggagcatgtctgtgg |
| | ggagtcacggatgactcaagaggccatgaggctggtggttgggagaccggtggcctcattgacaaccagg |
| | aaagtcaggaggaggagccagttggaggtgtgggggcgatggtgagctctgctttacaccagccgagttta |
| | aggtgtcagtgggacattgaagtggaactgggaggtgcggggagtgagctctgagccattccagggactg |
| | gggatcatgcctggggcacctccatccccatttccctggaatccagaagagttggggggtccgagctccctg |
| | tacctcaagtgaccctccatctctctcccatctctgtctctccctggtgtctgtttttcttctcctcctctccttgtctct |
| | ctcccacacccctccatctctctcccacgtgtctctcccctcaccttctctccccctccatttctctctccctaatct |
| | gtctgttccctctgccatggcccccttcttcaagcag (SEQ ID NO: 277) |
| Canonical exon | CGTGTTCCCGAGGGAGCTGAAGGAGGTGTTTGCTTCGTGGCGGCT |
| chr6: 33440729- | GCGCTGCGCAGAGCGAGGCCGGGAGGACATCGCAGACAGGCTTA |
| 33440965 | TCAGCGCCTCACTCTTCCTGCGCTTCCTCTGCCCAGCGATTATGTC |
| | GCCCAGTCTCTTTGGGCTTATGCAGGAGTACCCAGATGAGCAGAC |
| | CTCACGAACCCTCACCCTCATTGCCAAGGTCATCCAGAACCTGGC |
| | CAACTTTTCCAA (SEQ ID NO: 278) |
| Alternative exon | CCTCCCATCTTGCTCCTGCGGTCCCTCCTTCCCTGTCTCTCTCACC |
| chr6: 33440553- | CCTGTTTCCACACCCTCACCTCCTACCACCCCCCTCAGCATGTTCC |
| 33440965 | CTGGAAGCTGAGGGTCTCTGGGGCTCAGTCCCGGTCTCTCTCTTT |
| | CTCTCTCTCTCTCTCTGTCTCCCCGACCCTTCCCCCCAGCGTGTTC |
| | CCGAGGGAGCTGAAGGAGGTGTTTGCTTCGTGGCGGCTGCGCTGC |
| | GCAGAGCGAGGCCGGGAGGACATCGCAGACAGGCTTATCAGCGC |
| | CTCACTCTTCCTGCGCTTCCTCTGCCCAGCGATTATGTCGCCCAGT |
| | CTCTTTGGGCTTATGCAGGAGTACCCAGATGAGCAGACCTCACGA |
| | ACCCTCACCCTCATTGCCAAGGTCATCCAGAACCTGGCCAACTTT |
| | TCCAA (SEQ ID NO: 279) |

TABLE 4
SYNGAP1 sequences related to NMD exon 18x event

Gene: SYNGAP1
Intron: GRCh38/hg38: chr6 33447934 33451759
Intron Sequence:
gtggaaattacaatgtcatttatcttctccgtgtcccatccccatccatcccactgtctttcgtgcactcactacaccagccacctagccccatcaccatctgtctctcatagt
ctgctgtttgtccactggctgctcctggcagccccctagtgaccccatcttcatcccatcgtctgtgcctttgtcactcctggcagcgtcagcccaactcctgtgccttccc
atccagtcttcccactcctctctgcatctcaggaccttctctaccagaaccttggtctttctgcccctagaccccacctagttccaagaacccctgccccttctttgctcact
cctattcaagccacgttgttcagcttcctctgcgctcttgggccagagggctagaagctgccgttttctggaatagagcacagggcagtatgatctgtagtttctccagg
ccctggccggtaccctgaaaacttggggacccatcacctctgttctcttggctccctaattttcctgtctccttggcagctcctgcatagcttcctcttcctgactcttcagat
cttgaaggccttccatcctgtaacctccctttgccctcagtatttaagtccagcctccctctggcctccctcccactctggccctcagaccttcccagctgcctgctgccca
gcctctcttctcacaagccagcttctaggacctcccttctgcacccttaccccttgctttcccaaaattctgctcattttcctacccatactcctctttgctctgactgctaggct
ccccccgcctgccatccccccaccaaggctcctgaccccatgaccccactctctcccactgcagctcctcatcaggtaattctcctggttccgctttggccacggg
cggaggacacagggggaggtgactccggaccactgcaggttggtcgtgaagcccactccctccaacacctccggagcctctcccctctcactgctgccctccac
acccagagaacctccacagactccagccctccgacacctgcacagatccatctcccaagacaccacccaaagagagcatttgctgctgcttcccagaactgtccaac
aataccttagcaacaccaagagttgggccctagatgggcccagcacattcacaggtcacacccacttccctgcaaaacccaccccctcccagcctcctcctgactcta
agccctcctcttcctctacctctccagtgtatgtctgtcaccccccatttcaccagagcgtccttaggggctggggggggtttgttaatggggtggaggcaatgatggg
ttggaggatcttggctataggggctgtgctgactgcagcaggtaggttgggtttccctcttccttccctaatcttggttctctaccctcctttccactcctcacctgattctctc
tcttcctcctccttatatctgtgaggcagaaggcatctgaagctcatattagcccccattgggtgggaattaggagtgggtagttaactcagggagacttgagataccct
ggaaaaaatgctattgagatgtcctgacattaggcagggtggatggaacaagaaggagcaagaaaggaacctcaggcagatgttaggacatggacttgatcatgtg
gcctgggagtttagaaatggggagagacatcctcctagatcagatcgtgggctcagtaggcatgttgattcccagggagaggtgccaggaacagcatggtaaagaa
tgtactcttcacagctcacatccccaggttgctgatgccactcactccccctctcctgccatcgagtggccttgccggacacatcaccctacctaaaaagccagtaaatg
agaacctgtcagctatagccatcatttctgagatgcgattttctttgggattgagctgcagtgggcagtggctccttacactgtaattttaattctctgcctgcccagcctctc
tgtcaaagtagctggtgatctataaagatgctaaaaggcaccaggggactttgccatttaaaggactcctgcagtgaattcttttgtaaaatgaataatggcaccctaattt
atccactttctaaatttgggtccatgggggtgtccagggcatgcttatgtgctgtcaccagcagacaaacagagggaatggaatctgggggttccttccctgctctcccg
ccatactcaggataccctaccataagtgatttcctctcactgacttgcagaaaatgtgtgagatacccagcaagctaagaaggcagttttgctgggtatctcatacccaa
ggctggggtttgggtgatctgagaggttagctccttgatcctaggatggaagggagagcttatatagaagcttttacttggaaggttttgtatcctaaggtcagacatagc
tatattaccaagcctaaatgccatgtggcccaggaaataatttggacatttgttctaaaccacttgtggtaggtattggtctctctgcaactcagccattaattagaaattagt
tttgagcctgaattttaaaaagccaagtgttgcccccagcccacacacacacacacggacatgtacagtacaaaccccagataattacaacagccaaagagagaagg
aagtgaatttcccaaccagaagcgtagggaaattcagatggctttcttttctcccagcagaggaacagaaggggagctaagggcaggaaccaggagttggtcaag
gagctataggaggtgatgagagtagaaccaggggtaggagctggtctggtacccctcaccctctaattgggagcccagggagaaggactgaaaagaagatggga
gtggaaaagaataaagccagtttctgcttcccagggatgcagagattggggcatgctgtgtctgcagaagctcctagtcatttccgccataattgtgagagagagggg
cagccctcccacaagatttttccttcccatatcacttccctgaatccccttcctttccccccagtacagttaaacctctctctaatttggaatgttatatttgagaagatggcc
actgtgaataagtgacaaacggaatgacagtgtctatttaatgaaatgcatgtcttcaaaatatatacagaactcgatgaacaaggctttttccactcctcagggagcatg
cattaatgaatagataggattcaaaagtctgttttctggtatgggttaaatatcccctcctacagacatatttccaccactaatttgcttagtacaccttttcttcacagataaag
gaaaatgcaagctcagtttttcttcagattatgaagaaattccaaatccacaggggtttggattaatgaggttttgctgtactgcctccccttattcctcaacatgaagttccc
acctcggattggggatgggtgggagggggtttcaagaggaggagggtgggatgggcaaggaatatacacaggtgaagccagagaagggttaggttgggggtgc
ggtgggaacttgctgttttgatctggtttcctggtgtgacactctgggttaaaggcttgaaggcccctgttaggagtctaggggtgagattctcttctctctgatcccagag
gacgttaacttctactgcaggtgagaaacaaaataggaggatggtggggactgtcctgggaggagggggtggtccatggcttgtggtgtgggctggctatagggga
ggccactgctaggggactggcatccaggcccccttgaagcgtctcaataagtccgcgctctcctttttggtgtcttgcag (SEQ ID NO: 280)
Gene: SYNGAP1
SYNGAP1 exon 18x: GRCh38/hg38: chr6 33448789 33448868
SYNGAP1 exon 18x sequence:
Ctcctcatcaggtaattctcctggttccgctttggccacgggcggaggacacagggggaggtgactccggaccactgcag (SEQ ID NO: 281)

[0421] For example, in some embodiments, SYNGAP1 (Gene ID: 8831) is an exemplary target of the NMD-inducing Alternative 5′ splice site event or the NMD-inducing Alternative 3′ splice site event. In some embodiments, the compositions or the methods as described herein may be used to treat AD mental retardation 5 (OMIM: 612621) related to the haploinsufficiency of SYNGAP1 in the CNS.

[0422] In some embodiments, the compositions or the methods as described herein are used to treat a condition or disease selected from the group consisting autosomal dominant mental retardation-5 (MRD5; AD Mental Retardation 5). In some embodiments, the compositions or the methods as described herein are used to treat a condition or disease of Table 5B. In some embodiments, the compositions or the methods as described herein are used to prevent, delay the progression and/or development of a sign or a symptom, or alleviate a sig or a symptom associated with a condition or disease of Table 5B.

TABLE 5A

| | Region coordinates | | | Event coordinates | Event |
|---|---|---|---|---|---|
| Gene | chr | start | end | exon | type* |
| SYNGAP1 | chr6 | 33438920 | 33440552 | chr6 33440553 | alt_3ss |
| | | | | 33440728 + | |

*alt_3ss refers to an alternative 3′ splice site of an intron, which is equivalent to the alternative 5′ splice site of the exon immediately downstream of the intron. coordinate of alternative intron. Region coordinates: coordinates of alternative intron. Event coordinates: coordinates of intronic region that is included due to alternative 3′ss or 5′ss selection.
+ or − refers to the strand in which the gene is located.

TABLE 5B

| | | | Region | Event | Event | Event |
|---|---|---|---|---|---|---|
| Gene | Disease | Genetics | coordinates | coordinates | type* | size (bp) |
| SYNGAP1 | AD MENTAL | Haploinsufficiency | chr6 | chr6 | Alt 5′ss | −37 |
| | RETARDATION 5 | | 33438883 | 33438883 | | |
| | | | 33440728 | 33438919 | | |
| | | | chr6 | chr6 | Alt 3′ss | 179 |
| | | | 33438920 | 33440550 | | |
| | | | 33440549 | 33440728 | | |
| | | | chr6 | chr6 | Alt 3′ss | 176 |
| | | | 33438920 | 33440553 | | |
| | | | 33440552 | 33440728 | | |

*Alt 5ss refers to an alternative 5′ splice site of an intron, which is equivalent to the alternative 3′ splice site of the exon immediately upstream of the intron. Alt 3ss refers to an alternative 3′ splice site of an intron, which is equivalent to the alternative 5′ splice site of the exon immediately downstream of the intron. Region coordinates: coordinates of alternative intron. Event coordinates: coordinates of intronic region that is included due to alternative 3′ss or 5′ss selection.

TABLE 6
SYNGAP1 transcripts
Target: SYNGAP1

| | |
|---|---|
| pre-mRNA | premrna_ENST00000293748.9; premrna_ENST00000418600.7; |
| transcript | premrna_ENST00000428982.4; premrna_ENST00000449372.7; |
| | premrna_ENST00000470232.1; premrna_ENST00000479510.2; |
| | premrna_ENST00000628646.2; premrna_ENST00000629380.3; |
| | premrna_ENST00000635885.1; premrna_ENST00000636075.1; |
| | premrna_ENST00000636116.1; premrna_ENST00000636146.1; |
| | premrna_ENST00000636193.1; premrna_ENST00000636436.1; |
| | premrna_ENST00000636443.1; premrna_ENST00000636640.1; |
| | premrna_ENST00000636731.1; premrna_ENST00000636905.1; |
| | premrna_ENST00000637052.1; premrna_ENST00000637194.1; |
| | premrna_ENST00000637490.1; premrna_ENST00000637587.1; |
| | premrna_ENST00000637671.1; premrna_ENST00000637721.1; |
| | premrna_ENST00000637911.1; premrna_ENST00000638127.1; |
| | premrna_ENST00000638142.2; premrna_ENST00000644458.1; |
| | premrna_ENST00000645250.1; premrna_ENST00000646630.1 |

TABLE 7
SYNGAP1 Gene and Disease Information related
to NSAE event and NMD exon 18x event

| Gene | Gene | | | |
|---|---|---|---|---|
| Symbol | ID No. | Disease | OMIM | Genetics |
| SYNGAP1 | 11497 | Mental retardation, | 612621 | Haploinsufficient |
| | | autosomal | | |
| | | dominant 5 | | |

### Antisense Oligomers

[0423] Provided herein is a composition comprising an antisense oligomer that prevents alternative splicing by binding to a targeted portion of a SYNGAP1 pre-mRNA. Provided herein also is a composition comprising an antisense oligomer that prevents alternative splicing by binding to a targeted portion of a target pre-mRNA, wherein the target is SYNGAP1. As used herein, the terms “ASO” and “antisense oligomer” are used interchangeably and refer to an oligomer such as a polynucleotide or polynucleic acid polymer, comprising nucleobases that hybridizes to a target nucleic acid (e.g., a SYNGAP1 pre-mRNA) sequence by Watson-Crick base pairing or wobble base pairing (G-U). The ASO may have exact sequence complementary to the target sequence or near complementarity (e.g., sufficient complementarity to bind the target sequence and enhancing splicing at a splice site). ASOs are designed so that they bind (hybridize) to a target nucleic acid (e.g., a targeted portion of a pre-mRNA transcript) and remain hybridized under physiological conditions. Typically, if they hybridize to a site other than the intended (targeted) nucleic acid sequence, they hybridize to a limited number of sequences that are not a target nucleic acid (to a few sites other than a target nucleic acid). Design of an ASO can take into consideration the occurrence of the nucleic acid sequence of the targeted portion of the pre-mRNA transcript or a sufficiently similar nucleic acid sequence in other locations in the genome or cellular pre-mRNA or transcriptome, such that the likelihood the ASO will bind other sites and cause “off-target” effects is limited. Any antisense oligomers known in the art, for example in PCT Application No. PCT/US2014/054151, published as WO 2015/035091, titled “Reducing Nonsense-Mediated mRNA Decay,” incorporated by reference herein, can be used to practice the methods described herein.

[0424] In some embodiments, ASOs “specifically hybridize” to or are “specific” to a target nucleic acid or a targeted portion of a RIC pre-mRNA. Typically, such hybridization occurs with a Tₘ substantially greater than 37° C., preferably at least 50° C., and typically between 60° C. to approximately 90° C. Such hybridization preferably corresponds to stringent hybridization conditions. At a given ionic strength and pH, the Tₘ is the temperature at which 50% of a target sequence hybridizes to a complementary oligonucleotide.

[0425] Oligomers, such as oligonucleotides, are “complementary” to one another when hybridization occurs in an antiparallel configuration between two single-stranded polynucleotides. A double-stranded polynucleotide can be “complementary” to another polynucleotide, if hybridization can occur between one of the strands of the first polynucleotide and the second. Complementarity (the degree to which one polynucleotide is complementary with another) is quantifiable in terms of the proportion (e.g., the percentage) of bases in opposing strands that are expected to form hydrogen bonds with each other, according to generally accepted base-pairing rules. The sequence of an antisense oligomer (ASO) need not be 100% complementary to that of its target nucleic acid to hybridize. In certain embodiments, ASOs can comprise at least 70%, at least 75%, at least 80%, at least 85%, at least 90%, at least 95%, at least 96%, at least 97%, at least 98%, or at least 99% sequence complementarity to a target region within the target nucleic acid sequence to which they are targeted. For example, an ASO in which 18 of 20 nucleobases of the oligomeric compound are complementary to a target region, and would therefore specifically hybridize, would represent 90 percent complementarity. In this example, the remaining non-complementary nucleobases may be clustered together or interspersed with complementary nucleobases and need not be contiguous to each other or to complementary nucleobases. Percent complementarity of an ASO with a region of a target nucleic acid can be determined routinely using BLAST programs (basic local alignment search tools) and PowerBLAST programs known in the art (Altschul, et al., J. Mol. Biol., 1990, 215, 403-410; Zhang and Madden, Genome Res., 1997, 7, 649-656).

[0426] An ASO need not hybridize to all nucleobases in a target sequence and the nucleobases to which it does hybridize may be contiguous or noncontiguous. ASOs may hybridize over one or more segments of a pre-mRNA transcript, such that intervening or adjacent segments are not involved in the hybridization event (e.g., a loop structure or hairpin structure may be formed). In certain embodiments, an ASO hybridizes to noncontiguous nucleobases in a target pre-mRNA transcript. For example, an ASO can hybridize to nucleobases in a pre-mRNA transcript that are separated by one or more nucleobase(s) to which the ASO does not hybridize.

[0427] The ASOs described herein comprise nucleobases that are complementary to nucleobases present in a target portion of a NSAE pre-mRNA. The term ASO embodies oligonucleotides and any other oligomeric molecule that comprises nucleobases capable of hybridizing to a complementary nucleobase on a target mRNA but does not comprise a sugar moiety, such as a peptide nucleic acid (PNA). The ASOs may comprise naturally-occurring nucleotides, nucleotide analogs, modified nucleotides, or any combination of two or three of the preceding. The term “naturally occurring nucleotides” includes deoxyribonucleotides and ribonucleotides. The term “modified nucleotides” includes nucleotides with modified or substituted sugar groups and/or having a modified backbone. In some embodiments, all of the nucleotides of the ASO are modified nucleotides. Chemical modifications of ASOs or components of ASOs that are compatible with the methods and compositions described herein will be evident to one of skill in the art and can be found, for example, in U.S. Pat. No. 8,258,109 B2, U.S. Pat. No. 5,656,612, U.S. Patent Publication No. 2012/0190728, and Dias and Stein, Mol. Cancer Ther. 2002, 347-355, herein incorporated by reference in their entirety.

[0428] One or more nucleobases of an ASO may be any naturally occurring, unmodified nucleobase such as adenine, guanine, cytosine, thymine and uracil, or any synthetic or modified nucleobase that is sufficiently similar to an unmodified nucleobase such that it is capable of hydrogen bonding with a nucleobase present on a target pre-mRNA. Examples of modified nucleobases include, without limitation, hypoxanthine, xanthine, 7-methylguanine, 5, 6-dihydrouracil, 5-methylcytosine, and 5-hydroxymethoylcytosine.

[0429] The ASOs described herein also comprise a backbone structure that connects the components of an oligomer. The term “backbone structure” and “oligomer linkages” may be used interchangeably and refer to the connection between monomers of the ASO. In naturally occurring oligonucleotides, the backbone comprises a 3′-5′ phosphodiester linkage connecting sugar moieties of the oligomer. The backbone structure or oligomer linkages of the ASOs described herein may include (but are not limited to) phosphorothioate, phosphorodithioate, phosphoroselenoate, phosphorodiselenoate, phosphoroanilothioate, phosphoraniladate, phosphoramidate, and the like. See, e.g., LaPlanche, et al., Nucleic Acids Res. 14:9081 (1986); Stec, et al., J. Am. Chem. Soc. 106:6077 (1984), Stein, et al., Nucleic Acids Res. 16:3209 (1988), Zon, et al., Anti-Cancer Drug Design 6:539 (1991); Zon, et al., Oligonucleotides and Analogues: A Practical Approach, pp. 87-108 (F. Eckstein, Ed., Oxford University Press, Oxford England (1991)); Stec, et al., U.S. Pat. No. 5,151,510; Uhlmann and Peyman, Chemical Reviews 90:543 (1990). In some embodiments, the backbone structure of the ASO does not contain phosphorous but rather contains peptide bonds, for example in a peptide nucleic acid (PNA), or linking groups including carbamate, amides, and linear and cyclic hydrocarbon groups. In some embodiments, the backbone modification is a phosphothioate linkage. In some embodiments, the backbone modification is a phosphoramidate linkage.

[0430] In some embodiments, the stereochemistry at each of the phosphorus internucleotide linkages of the ASO backbone is random. In some embodiments, the stereochemistry at each of the phosphorus internucleotide linkages of the ASO backbone is controlled and is not random. For example, U.S. Pat. App. Pub. No. 2014/0194610, “Methods for the Synthesis of Functionalized Nucleic Acids,” incorporated herein by reference, describes methods for independently selecting the handedness of chirality at each phosphorous atom in a nucleic acid oligomer. In some embodiments, an ASO used in the methods of the invention, including, but not limited to, any of the ASOs set forth herein in Table 1 or Table 2, comprises an ASO having phosphorus internucleotide linkages that are not random. In some embodiments, a composition used in the methods of the invention comprises a pure diastereomeric ASO. In some embodiments, a composition used in the methods of the invention comprises an ASO that has diastereomeric purity of at least about 90%, at least about 91%, at least about 92%, at least about 93%, at least about 94%, at least about 95%, at least about 96%, at least about 97%, at least about 98%, at least about 99%, about 100%, about 90% to about 100%, about 91% to about 100%, about 92% to about 100%, about 93% to about 100%, about 94% to about 100%, about 95% to about 100%, about 96% to about 100%, about 97% to about 100%, about 98% to about 100%, or about 99% to about 100%.

[0431] In some embodiments, the ASO has a nonrandom mixture of Rp and Sp configurations at its phosphorus internucleotide linkages. For example, it has been suggested that a mix of Rp and Sp is required in antisense oligonucleotides to achieve a balance between good activity and nuclease stability (Wan, et al., 2014, “Synthesis, biophysical properties and biological activity of second-generation antisense oligonucleotides containing chiral phosphorothioate linkages,” Nucleic Acids Research 42(22): 13456-13468, incorporated herein by reference). In some embodiments, an ASO used in the methods of the invention, including, but not limited to, any of the ASOs set forth herein in Table 1 or Table 2, comprises about 5-100% Rp, at least about 5% Rp, at least about 10% Rp, at least about 15% Rp, at least about 20% Rp, at least about 25% Rp, at least about 30% Rp, at least about 35% Rp, at least about 40% Rp, at least about 45% Rp, at least about 50% Rp, at least about 55% Rp, at least about 60% Rp, at least about 65% Rp, at least about 70% Rp, at least about 75% Rp, at least about 80% Rp, at least about 85% Rp, at least about 90% Rp, or at least about 95% Rp, with the remainder Sp, or about 100% Rp. In some embodiments, an ASO used in the methods of the invention, including, but not limited to, any of the ASOs set forth herein in Table 1 or Table 2, comprises about 10% to about 100% Rp, about 15% to about 100% Rp, about 20% to about 100% Rp, about 25% to about 100% Rp, about 30% to about 100% Rp, about 35% to about 100% Rp, about 40% to about 100% Rp, about 45% to about 100% Rp, about 50% to about 100% Rp, about 55% to about 100% Rp, about 60% to about 100% Rp, about 65% to about 100% Rp, about 70% to about 100% Rp, about 75% to about 100% Rp, about 80% to about 100% Rp, about 85% to about 100% Rp, about 90% to about 100% Rp, or about 95% to about 100% Rp, about 20% to about 80% Rp, about 25% to about 75% Rp, about 30% to about 70% Rp, about 40% to about 60% Rp, or about 45% to about 55% Rp, with the remainder Sp.

[0432] In embodiments, an ASO used in the methods of the invention, including, but not limited to, any of the ASOs set forth herein in Table 1 or Table 2, comprises about 5-100% Sp, at least about 5% Sp, at least about 10% Sp, at least about 15% Sp, at least about 20% Sp, at least about 25% Sp, at least about 30% Sp, at least about 35% Sp, at least about 40% Sp, at least about 45% Sp, at least about 50% Sp, at least about 55% Sp, at least about 60% Sp, at least about 65% Sp, at least about 70% Sp, at least about 75% Sp, at least about 80% Sp, at least about 85% Sp, at least about 90% Sp, or at least about 95% Sp, with the remainder Rp, or about 100% Sp. In some embodiments, an ASO used in the methods of the invention, including, but not limited to, any of the ASOs set forth herein in Table 1 or Table 2, comprises about 10% to about 100% Sp, about 15% to about 100% Sp, about 20% to about 100% Sp, about 25% to about 100% Sp, about 30% to about 100% Sp, about 35% to about 100% Sp, about 40% to about 100% Sp, about 45% to about 100% Sp, about 50% to about 100% Sp, about 55% to about 100% Sp, about 60% to about 100% Sp, about 65% to about 100% Sp, about 70% to about 100% Sp, about 75% to about 100% Sp, about 80% to about 100% Sp, about 85% to about 100% Sp, about 90% to about 100% Sp, or about 95% to about 100% Sp, about 20% to about 80% Sp, about 25% to about 75% Sp, about 30% to about 70% Sp, about 40% to about 60% Sp, or about 45% to about 55% Sp, with the remainder Rp.

[0433] Any of the ASOs described herein may contain a sugar moiety that comprises ribose or deoxyribose, as present in naturally occurring nucleotides, or a modified sugar moiety or sugar analog, including a morpholine ring. Non-limiting examples of modified sugar moieties include 2′ substitutions such as 2′-O-methyl (2′-O-Me), 2′-O-methoxyethyl (2′MOE), 2′-O-aminoethyl, 2′F; N3′->P5′ phosphoramidate, 2′dimethylaminooxyethoxy, 2′dimethylaminoethoxyethoxy, 2′-guanidinidium, 2′-O-guanidinium ethyl, carbamate modified sugars, and bicyclic modified sugars. In some embodiments, the sugar moiety modification is selected from 2′-O-Me, 2′F, and 2′MOE. In some embodiments, the sugar moiety modification is an extra bridge bond, such as in a locked nucleic acid (LNA). In some embodiments the sugar analog contains a morpholine ring, such as phosphorodiamidate morpholino (PMO). In some embodiments, the sugar moiety comprises a ribofuranosyl or 2′deoxyribofuransyl modification. In some embodiments, the sugar moiety comprises 2′4′-constrained 2′O-methyloxyethyl (cMOE) modifications. In some embodiments, the sugar moiety comprises cEt 2′, 4′ constrained 2′-0 ethyl BNA modifications. In some embodiments, the sugar moiety comprises tricycloDNA (tcDNA) modifications. In some embodiments, the sugar moiety comprises ethylene nucleic acid (ENA) modifications. In some embodiments, the sugar moiety comprises MCE modifications. Modifications are known in the art and described in the literature, e.g., by Jarver, et al., 2014, “A Chemical View of Oligonucleotides for Exon Skipping and Related Drug Applications,” Nucleic Acid Therapeutics 24(1): 37-47, incorporated by reference for this purpose herein.

[0434] In some embodiments, each monomer of the ASO is modified in the same way, for example each linkage of the backbone of the ASO comprises a phosphorothioate linkage or each ribose sugar moiety comprises a 2′O-methyl modification. Such modifications that are present on each of the monomer components of an ASO are referred to as “uniform modifications.” In some embodiments, a combination of different modifications may be desired, for example, an ASO may comprise a combination of phosphorodiamidate linkages and sugar moieties comprising morpholine rings (morpholinos). Combinations of different modifications to an ASO are referred to as “mixed modifications” or “mixed chemistries.”

[0435] In some embodiments, the ASO comprises one or more backbone modification. In some embodiments, the ASO comprises one or more sugar moiety modification. In some embodiments, the ASO comprises one or more backbone modification and one or more sugar moiety modification. In some embodiments, the ASO comprises 2′MOE modifications and a phosphorothioate backbone. In some embodiments, the ASO comprises a phosphorodiamidate morpholino (PMO). In some embodiments, the ASO comprises a peptide nucleic acid (PNA). Any of the ASOs or any component of an ASO (e.g., a nucleobase, sugar moiety, backbone) described herein may be modified in order to achieve desired properties or activities of the ASO or reduce undesired properties or activities of the ASO. In some embodiments, an ASO or one or more component of any ASO may be modified to enhance binding affinity to a target sequence on a pre-mRNA transcript; reduce binding to any non-target sequence; reduce degradation by cellular nucleases (i.e., RNase H); improve uptake of the ASO into a cell and/or into the nucleus of a cell; alter the pharmacokinetics or pharmacodynamics of the ASO; and modulate the half-life of the ASO.

[0436] In some embodiments, the ASOs are comprised of 2′-O-(2-methoxyethyl) (MOE) phosphorothioate-modified nucleotides. ASOs comprised of such nucleotides are especially well-suited to the methods disclosed herein; oligomers having such modifications have been shown to have significantly enhanced resistance to nuclease degradation and increased bioavailability, making them suitable, for example, for oral delivery in some embodiments described herein. See e.g., Geary, et al., J Pharmacol Exp Ther. 2001; 296(3):890-7; Geary, et al., J Pharmacol Exp Ther. 2001; 296(3):898-904.

[0437] Methods of synthesizing ASOs will be known to one of skill in the art. Alternatively or in addition, ASOs may be obtained from a commercial source.

[0438] Unless specified otherwise, the left-hand end of single-stranded nucleic acid (e.g., pre-mRNA transcript, oligonucleotide, ASO, etc.) sequences is the 5′ end and the left-hand direction of single or double-stranded nucleic acid sequences is referred to as the 5′ direction. Similarly, the right-hand end or direction of a nucleic acid sequence (single or double stranded) is the 3′ end or direction. Generally, a region or sequence that is 5′ to a reference point in a nucleic acid is referred to as “upstream,” and a region or sequence that is 3′ to a reference point in a nucleic acid is referred to as “downstream.” Generally, the 5′ direction or end of an mRNA is where the initiation or start codon is located, while the 3′ end or direction is where the termination codon is located. In some embodiments, nucleotides that are upstream of a reference point in a nucleic acid may be designated by a negative number, while nucleotides that are downstream of a reference point may be designated by a positive number. For example, a reference point (e.g., an exon-exon junction in mRNA) may be designated as the “zero” site, and a nucleotide that is directly adjacent and upstream of the reference point is designated “minus one,” e.g., “−1,” while a nucleotide that is directly adjacent and downstream of the reference point is designated “plus one,” e.g., “+1.”

[0439] In some embodiments, the ASOs are complementary to (and bind to) a targeted portion of a SYNGAP1 pre-mRNA that is downstream (in the 3′ direction) of the 5′ splice site of the NSAE in a SYNGAP1 pre-mRNA (e.g., the direction designated by positive numbers relative to the 5′ splice site). In some embodiments, the ASOs are complementary to a targeted portion of the SYNGAP1 pre-mRNA that is within the region about +6 to about +500 relative to the 5′ splice site of the NSAE. In some embodiments, the ASO is not complementary to nucleotides +1 to +5 relative to the 5′ splice site (the first five nucleotides located downstream of the 5′ splice site). In some embodiments, the ASOs may be complementary to a targeted portion of a SYNGAP1 pre-mRNA that is within the region between nucleotides +6 and +100 relative to the 5′ splice site of the NSAE. In some aspects, the ASOs are complementary to a targeted portion that is within the region about +6 to about +500, about +6 to about +490, about +6 to about +480, about +6 to about +470, about +6 to about +460, about +6 to about +450, about +6 to about +440, about +6 to about +430, about +6 to about +420, about +6 to about +410, about +6 to about +400, about +6 to about +390, about +6 to about +380, about +6 to about +370, about +6 to about +360, about +6 to about +350, about +6 to about +340, about +6 to about +330, about +6 to about +320, about +6 to about +310, about +6 to about +300, about +6 to about +290, about +6 to about +280, about +6 to about +270, about +6 to about +260, about +6 to about +250, about +6 to about +240, about +6 to about +230, about +6 to about +220, about +6 to about +210, about +6 to about +200, about +6 to about +190, about +6 to about +180, about +6 to about +170, about +6 to about +160, about +6 to about +150, about +6 to about +140, about +6 to about +130, about +6 to about +120, about +6 to about +110, about +6 to about +100, about +6 to about +90, about +6 to about +80, about +6 to about +70, about +6 to about +60, about +6 to about +50, about +6 to about +40, about +6 to about +30, or about +6 to about +20 relative to 5′ splice site of the NSAE.

[0440] In some embodiments, the ASOs are complementary to (and bind to) a targeted portion of a target pre-mRNA that is downstream (in the 3′ direction) of the 5′ splice site of the NSAE in a target pre-mRNA (e.g., the direction designated by positive numbers relative to the 5′ splice site), wherein the target is SYNGAP1. In some embodiments, the ASOs are complementary to a targeted portion of the target pre-mRNA that is within the region about +6 to about +500 relative to the 5′ splice site of the NSAE. In some embodiments, the ASO is not complementary to nucleotides +1 to +5 relative to the 5′ splice site (the first five nucleotides located downstream of the 5′ splice site). In some embodiments, the ASOs may be complementary to a targeted portion of a target pre-mRNA that is within the region between nucleotides +6 and +100 relative to the 5′ splice site of the NSAE. In some aspects, the ASOs are complementary to a targeted portion that is within the region about +6 to about +500, about +6 to about +490, about +6 to about +480, about +6 to about +470, about +6 to about +460, about +6 to about +450, about +6 to about +440, about +6 to about +430, about +6 to about +420, about +6 to about +410, about +6 to about +400, about +6 to about +390, about +6 to about +380, about +6 to about +370, about +6 to about +360, about +6 to about +350, about +6 to about +340, about +6 to about +330, about +6 to about +320, about +6 to about +310, about +6 to about +300, about +6 to about +290, about +6 to about +280, about +6 to about +270, about +6 to about +260, about +6 to about +250, about +6 to about +240, about +6 to about +230, about +6 to about +220, about +6 to about +210, about +6 to about +200, about +6 to about +190, about +6 to about +180, about +6 to about +170, about +6 to about +160, about +6 to about +150, about +6 to about +140, about +6 to about +130, about +6 to about +120, about +6 to about +110, about +6 to about +100, about +6 to about +90, about +6 to about +80, about +6 to about +70, about +6 to about +60, about +6 to about +50, about +6 to about +40, about +6 to about +30, or about +6 to about +20 relative to 5′ splice site of the NSAE.

[0441] In some embodiments, the ASOs are complementary to (and bind to) a targeted portion of a SYNGAP1 pre-mRNA that is upstream (in the 5′ direction) of the 3′ splice site of the NSAE in a SYNGAP1 pre-mRNA (e.g., the direction designated by negative numbers relative to the 3′ splice site). In some embodiments, the ASOs are complementary to a targeted portion of the SYNGAP1 pre-mRNA that is within the region about −16 to about −500 relative to the 3′ splice site of the NSAE. In some embodiments, the ASO is not complementary to nucleotides −1 to −15 relative to the 5′ splice site (the first five nucleotides located downstream of the 5′ splice site). In some embodiments, the ASOs may be complementary to a targeted portion of a SYNGAP1 pre-mRNA that is within the region between nucleotides −16 and −100 relative to the 3′ splice site of the NSAE. In some aspects, the ASOs are complementary to a targeted portion that is within the region about +6 to about +500, about +6 to about +490, about +6 to about +480, about +6 to about +470, about +6 to about +460, about +6 to about +450, about +6 to about +440, about +6 to about +430, about +6 to about +420, about +6 to about +410, about +6 to about +400, about +6 to about +390, about +6 to about +380, about +6 to about +370, about +6 to about +360, about +6 to about +350, about +6 to about +340, about +6 to about +330, about +6 to about +320, about +6 to about +310, about +6 to about +300, about +6 to about +290, about +6 to about +280, about +6 to about +270, about +6 to about +260, about +6 to about +250, about +6 to about +240, about +6 to about +230, about +6 to about +220, about +6 to about +210, about +6 to about +200, about +6 to about +190, about +6 to about +180, about +6 to about +170, about +6 to about +160, about +6 to about +150, about +6 to about +140, about +6 to about +130, about +6 to about +120, about +6 to about +110, about +6 to about +100, about +6 to about +90, about +6 to about +80, about +6 to about +70, about +6 to about +60, about +6 to about +50, about +6 to about +40, about +6 to about +30, or about +6 to about +20 relative to 3′ splice site of the NSAE.

[0442] In some embodiments, the ASOs are complementary to (and bind to) a targeted portion of a target pre-mRNA that is upstream (in the 5′ direction) of the 3′ splice site of the NSAE in a target pre-mRNA (e.g., the direction designated by negative numbers relative to the 3′ splice site), wherein the target is SYNGAP1. In some embodiments, the ASOs are complementary to a targeted portion of the target pre-mRNA that is within the region about −16 to about −500 relative to the 3′ splice site of the NSAE. In some embodiments, the ASO is not complementary to nucleotides −1 to −15 relative to the 5′ splice site (the first five nucleotides located downstream of the 5′ splice site). In some embodiments, the ASOs may be complementary to a targeted portion of a target pre-mRNA that is within the region between nucleotides −16 and −100 relative to the 3′ splice site of the NSAE. In some aspects, the ASOs are complementary to a targeted portion that is within the region about +6 to about +500, about +6 to about +490, about +6 to about +480, about +6 to about +470, about +6 to about +460, about +6 to about +450, about +6 to about +440, about +6 to about +430, about +6 to about +420, about +6 to about +410, about +6 to about +400, about +6 to about +390, about +6 to about +380, about +6 to about +370, about +6 to about +360, about +6 to about +350, about +6 to about +340, about +6 to about +330, about +6 to about +320, about +6 to about +310, about +6 to about +300, about +6 to about +290, about +6 to about +280, about +6 to about +270, about +6 to about +260, about +6 to about +250, about +6 to about +240, about +6 to about +230, about +6 to about +220, about +6 to about +210, about +6 to about +200, about +6 to about +190, about +6 to about +180, about +6 to about +170, about +6 to about +160, about +6 to about +150, about +6 to about +140, about +6 to about +130, about +6 to about +120, about +6 to about +110, about +6 to about +100, about +6 to about +90, about +6 to about +80, about +6 to about +70, about +6 to about +60, about +6 to about +50, about +6 to about +40, about +6 to about +30, or about +6 to about +20 relative to 3′ splice site of the NSAE.

[0443] In some embodiments, the targeted portion of the SYNGAP1 pre-mRNA is within the region −4e relative to the 3′ splice site (5′ end) of the NSAE to +2e relative to the 5′ splice site (3′ end) of the NSAE.

[0444] In some embodiments, the targeted portion of the target pre-mRNA is within the region −4e relative to the 3′ splice site (5′ end) of the NSAE to +2e relative to the 5′ splice site (3′ end) of the NSAE, wherein the target is SYNGAP1. The ASOs may be of any length suitable for specific binding and effective enhancement of splicing. In some embodiments, the ASOs consist of 8 to 50 nucleobases. For example, the ASO may be 8, 9, 10, 11, 12, 13, 14, 15, 16, 17, 18, 19, 20, 21, 22, 23, 24, 25, 26, 27, 28, 29, 30, 31, 32, 33, 34, 35, 40, 45, or 50 nucleobases in length. In some embodiments, the ASOs consist of more than 50 nucleobases. In some embodiments, the ASO is from 8 to 50 nucleobases, 8 to 40 nucleobases, 8 to 35 nucleobases, 8 to 30 nucleobases, 8 to 25 nucleobases, 8 to 20 nucleobases, 8 to 15 nucleobases, 9 to 50 nucleobases, 9 to 40 nucleobases, 9 to 35 nucleobases, 9 to 30 nucleobases, 9 to 25 nucleobases, 9 to 20 nucleobases, 9 to 15 nucleobases, 10 to 50 nucleobases, 10 to 40 nucleobases, 10 to 35 nucleobases, 10 to 30 nucleobases, 10 to 25 nucleobases, 10 to 20 nucleobases, 10 to 15 nucleobases, 11 to 50 nucleobases, 11 to 40 nucleobases, 11 to 35 nucleobases, 11 to 30 nucleobases, 11 to 25 nucleobases, 11 to 20 nucleobases, 11 to 15 nucleobases, 12 to 50 nucleobases, 12 to 40 nucleobases, 12 to 35 nucleobases, 12 to 30 nucleobases, 12 to 25 nucleobases, 12 to 20 nucleobases, 12 to 15 nucleobases, 13 to 50 nucleobases, 13 to 40 nucleobases, 13 to 35 nucleobases, 13 to 30 nucleobases, 13 to 25 nucleobases, 13 to 20 nucleobases, 14 to 50 nucleobases, 14 to 40 nucleobases, 14 to 35 nucleobases, 14 to 30 nucleobases, 14 to 25 nucleobases, 14 to 20 nucleobases, 15 to 50 nucleobases, 15 to 40 nucleobases, 15 to 35 nucleobases, 15 to 30 nucleobases, 15 to 25 nucleobases, 15 to 20 nucleobases, 20 to 50 nucleobases, 20 to 40 nucleobases, 20 to 35 nucleobases, 20 to 30 nucleobases, 20 to 25 nucleobases, 25 to 50 nucleobases, 25 to 40 nucleobases, 25 to 35 nucleobases, or 25 to 30 nucleobases in length. In some embodiments, the ASOs are 15 nucleotides in length. In some embodiments, the ASOs are 16 nucleotides in length. In some embodiments, the ASOs are 17 nucleotides in length. In some embodiments, the ASOs are 18 nucleotides in length. In some embodiments, the ASOs are 25 nucleotides in length.

[0445] In some embodiments, two or more ASOs with different chemistries but complementary to the same targeted portion of the NSAE pre-mRNA are used. In some embodiments, two or more ASOs that are complementary to different targeted portions of the NSAE pre-mRNA are used.

[0446] In some embodiments, the antisense oligonucleotides of the invention are chemically linked to one or more moieties or conjugates, e.g., a targeting moiety or other conjugate that enhances the activity or cellular uptake of the oligonucleotide. Such moieties include, but are not limited to, a lipid moiety, e.g., as a cholesterol moiety, a cholesteryl moiety, an aliphatic chain, e.g., dodecandiol or undecyl residues, a polyamine, or a polyethylene glycol chain, or adamantane acetic acid. Oligonucleotides comprising lipophilic moieties and preparation methods have been described in the published literature. In embodiments, the antisense oligonucleotide is conjugated with a moiety including, but not limited to, an abasic nucleotide, a polyether, a polyamine, a polyamide, a peptide, a carbohydrate, e.g., N-acetylgalactosamine (GalNAc), N-Ac-Glucosamine (GluNAc), or mannose (e.g., mannose-6-phosphate), a lipid, or a polyhydrocarbon compound. Conjugates can be linked to one or more of any nucleotides comprising the antisense oligonucleotide at any of several positions on the sugar, base, or phosphate group, as understood in the art and described in the literature, e.g., using a linker. Linkers can include a bivalent or trivalent branched linker. In embodiments, the conjugate is attached to the 3′ end of the antisense oligonucleotide. Methods of preparing oligonucleotide conjugates are described, e.g., in U.S. Pat. No. 8,450,467, “Carbohydrate conjugates as delivery agents for oligonucleotides,” incorporated by reference herein.

[0447] In some embodiments, the antisense oligonucleotides of the disclosure are chemically linked to a lipophilic group. Representative conjugate moieties can include lipophilic molecules (aromatic and non-aromatic) including sterol and steroid molecules. Lipophilic conjugate moieties can be used, for example, to counter the hydrophilic nature of an oligomeric compound and enhance cellular penetration. Lipophilic moieties include, for example, steroids and related compounds such as cholesterol (U.S. Pat. No. 4,958,013 and Letsinger et al., Proc. Natl. Acad. Sci. USA, 1989, 86, 6553), thiocholesterol (Oberhauser et al., Nucl Acids Res., 1992, 20, 533), lanosterol, coprostanol, stigmasterol, ergosterol, calciferol, cholic acid, deoxycholic acid, estrone, estradiol, estratriol, progesterone, stilbestrol, testosterone, androsterone, deoxycorticosterone, cortisone, 17-hydroxycorticosterone, their derivatives, and the like. Other lipophilic conjugate moieties include aliphatic groups, such as, for example, straight chain, branched, and cyclic alkyls, alkenyls, and alkynyls. The aliphatic groups can have, for example, 5 to about 50, 6 to about 50, 8 to about 50, or 10 to about 50 carbon atoms. Example aliphatic groups include undecyl, dodecyl, hexadecyl, heptadecyl, octadecyl, nonadecyl, terpenes, bornyl, adamantyl, derivatives thereof and the like. In some embodiments, one or more carbon atoms in the aliphatic group can be replaced by a heteroatom such as O, S, or N (e.g., geranyloxyhexyl). Further suitable lipophilic conjugate moieties include aliphatic derivatives of glycerols such as alkylglycerols, bis(alkyl)glycerols, tris(alkyl)glycerols, monoglycerides, diglycerides, and triglycerides. In some embodiments, the lipophilic conjugate is di-hexyldecyl-rac-glycerol or 1,2-di-O-hexyldecyl-rac-glycerol (Manoharan et al., Tetrahedron Lett., 1995, 36, 3651; Shea, et al., Nuc. Acids Res., 1990, 18, 3777) or phosphonates thereof. Saturated and unsaturated fatty functionalities, such as, for example, fatty acids, fatty alcohols, fatty esters, and fatty amines, can also serve as lipophilic conjugate moieties. In some embodiments, the fatty functionalities can contain from about 6 carbons to about 30 or about 8 to about 22 carbons. Example fatty acids include, capric, caprylic, lauric, palmitic, myristic, stearic, oleic, linoleic, linolenic, arachidonic, eicosenoic acids and the like. In further embodiments, lipophilic conjugate groups can be polycyclic aromatic groups having from 6 to about 50, 10 to about 50, or 14 to about 40 carbon atoms. Example polycyclic aromatic groups include pyrenes, purines, acridines, xanthenes, fluorenes, phenanthrenes, anthracenes, quinolines, isoquinolines, naphthalenes, derivatives thereof and the like. [0037] Other suitable lipophilic conjugate moieties include menthols, trityls (e.g., dimethoxytrityl (DMT)), phenoxazines, lipoic acid, phospholipids, ethers, thioethers (e.g., hexyl-S-tritylthiol), derivatives thereof and the like. Preparation of lipophilic conjugates of oligomeric compounds are well-described in the art, such as in, for example, Saison-Behmoaras et al., EMBO J., 1991; Kabanov et al., FEBSLett., 1990, 259, 327; Svinarchuk et al., Biochimie, 1993, 75, 49; (Mishra et al., Biochim. Biophys. Acta, 1995, 1264, 229, and Manoharan et al., Tetrahedron Lett., 1995, 36, 3651.

[0448] Oligomeric compounds containing conjugate moieties with affinity for low density lipoprotein (LDL) can help provide an effective targeted delivery system. High expression levels of receptors for LDL on tumor cells makes LDL an attractive carrier for selective delivery of drugs to these cells (Rump, et al., Bioconjugate Chem., 1998, 9, 341; Firestone, Bioconjugate Chem., 1994, 5, 105; Mishra, et al., Biochim. Biophys. Acta, 1995, 1264, 229). Moieties having affinity for LDL include many lipophilic groups such as steroids (e.g., cholesterol), fatty acids, derivatives thereof and combinations thereof. In some embodiments, conjugate moieties having LDL affinity can be dioleyl esters of cholic acids such as chenodeoxycholic acid and lithocholic acid.

[0449] In some embodiments, the conjugate group is or may comprise a lipophilic moiety, such as a sterol (for example, cholesterol, cholesteryl, cholestanol, stigmasterol, cholanic acid and ergosterol). In some embodiments, the conjugate is or may comprise cholesterol. See for example, Soutschek et al., Nature (2004) 432, 173; KrQtzfeldt Nature 2005, NAR 2007.

[0450] In some embodiments, the conjugate is, or may comprise a lipid, a phospholipid or a lipophilic alcohol, such as a cationic lipid, a neutral lipid, a sphingolipid, and fatty acids such as stearic, oleic, elaidic, linoleic, linoleaidic, linolenic, and myristic acids. In some embodiments the fatty acid comprises a C4-C30 saturated or unsaturated alkyl chain. The alkyl chain may be linear or branched.

[0451] In some embodiments, the nucleic acid to be targeted by an ASO is a SYNGAP1 pre-mRNA expressed in a cell, such as a eukaryotic cell. In some embodiments, the nucleic acid to be targeted by an ASO is a pre-mRNA expressed in a cell, such as a eukaryotic cell, wherein the target is SYNGAP1. In some embodiments, the term “cell” may refer to a population of cells. In some embodiments, the cell is in a subject. In some embodiments, the cell is isolated from a subject. In some embodiments, the cell is ex vivo. In some embodiments, the cell is a condition or disease-relevant cell or a cell line. In some embodiments, the cell is in vitro (e.g., in cell culture).

[0452] Where reference is made to a polynucleic acid polymer sequence, the skilled person will understand that one or more substitutions may be tolerated, optionally two substitutions may be tolerated in the sequence, such that it maintains the ability to hybridize to the target sequence; or where the substitution is in a target sequence, the ability to be recognized as the target sequence. References to sequence identity may be determined by BLAST sequence alignment using standard/default parameters. For example, the sequence may have 99% identity and still function according to the present disclosure. In other embodiments, the sequence may have 98% identity and still function according to the present disclosure. In another embodiment, the sequence may have 95% identity and still function according to the present disclosure. In another embodiment, the sequence may have 90% identity and still function according to the present disclosure.

### Pharmaceutical Compositions

[0453] Pharmaceutical compositions or formulations comprising the agent, e.g., antisense oligonucleotide, of the described compositions and for use in any of the described methods can be prepared according to conventional techniques well known in the pharmaceutical industry and described in the published literature. In embodiments, a pharmaceutical composition or formulation for treating a subject comprises an effective amount of any antisense oligomer as described herein, or a pharmaceutically acceptable salt, solvate, hydrate or ester thereof. The pharmaceutical formulation comprising an antisense oligomer may further comprise a pharmaceutically acceptable excipient, diluent, or carrier.

[0454] Pharmaceutically acceptable salts are suitable for use in contact with the tissues of humans and lower animals without undue toxicity, irritation, allergic response, etc., and are commensurate with a reasonable benefit/risk ratio. (See, e.g., S. M. Berge, et al., J. Pharmaceutical Sciences, 66: 1-19 (1977), incorporated herein by reference for this purpose. The salts can be prepared in situ during the final isolation and purification of the compounds, or separately by reaction between the free base and a suitable organic acid. Examples of pharmaceutically acceptable, nontoxic acid addition salts are salts of an amino group formed with inorganic acids such as hydrochloric acid, hydrobromic acid, phosphoric acid, sulfuric acid and perchloric acid or with organic acids such as acetic acid, oxalic acid, maleic acid, tartaric acid, citric acid, succinic acid, or malonic acid or by using other documented methodologies such as ion exchange. Other pharmaceutically acceptable salts include adipate, alginate, ascorbate, aspartate, benzenesulfonate, benzoate, bisulfate, borate, butyrate, camphorate, camphorsulfonate, citrate, cyclopentanepropionate, digluconate, dodecylsulfate, ethanesulfonate, formate, fumarate, glucoheptonate, glycerophosphate, gluconate, hemisulfate, heptanoate, hexanoate, hydroiodide, 2-hydroxy-ethanesulfonate, lactobionate, lactate, laurate, lauryl sulfate, malate, maleate, malonate, methanesulfonate, 2-naphthalenesulfonate, nicotinate, nitrate, oleate, oxalate, palmitate, pamoate, pectinate, persulfate, 3-phenylpropionate, phosphate, picrate, pivalate, propionate, stearate, succinate, sulfate, tartrate, thiocyanate, p-toluenesulfonate, undecanoate, valerate salts, and the like. Representative alkali or alkaline earth metal salts include sodium, lithium, potassium, calcium, magnesium, and the like. Further pharmaceutically acceptable salts include, when appropriate, nontoxic ammonium, quaternary ammonium, and amine cations formed using counterions such as halide, hydroxide, carboxylate, sulfate, phosphate, nitrate, loweralkyl sulfonate and aryl sulfonate.

[0455] In some embodiments, the compositions are formulated into any of many possible dosage forms such as, but not limited to, tablets, capsules, gel capsules, liquid syrups, soft gels, suppositories, and enemas. In some embodiments, the compositions are formulated as suspensions in aqueous, non-aqueous or mixed media. Aqueous suspensions may further contain substances that increase the viscosity of the suspension including, for example, sodium carboxymethylcellulose, sorbitol and/or dextran. The suspension may also contain stabilizers. In some embodiments, a pharmaceutical formulation or composition of the present invention includes, but is not limited to, a solution, emulsion, microemulsion, foam or liposome-containing formulation (e.g., cationic or noncationic liposomes).

[0456] The pharmaceutical composition or formulation of the present invention may comprise one or more penetration enhancer, carrier, excipients or other active or inactive ingredients as appropriate and well known to those of skill in the art or described in the published literature. In some embodiments, liposomes also include sterically stabilized liposomes, e.g., liposomes comprising one or more specialized lipids. These specialized lipids result in liposomes with enhanced circulation lifetimes. In some embodiments, a sterically stabilized liposome comprises one or more glycolipids or is derivatized with one or more hydrophilic polymers, such as a polyethylene glycol (PEG) moiety. In some embodiments, a surfactant is included in the pharmaceutical formulation or compositions. The use of surfactants in drug products, formulations and emulsions is well known in the art. In some embodiments, the present invention employs a penetration enhancer to effect the efficient delivery of the antisense oligonucleotide, e.g., to aid diffusion across cell membranes and/or enhance the permeability of a lipophilic drug. In some embodiments, the penetration enhancers are a surfactant, fatty acid, bile salt, chelating agent, or non-chelating nonsurfactant.

[0457] In some embodiments, the pharmaceutical formulation comprises multiple antisense oligonucleotides. In some embodiments, the antisense oligonucleotide is administered in combination with another drug or therapeutic agent.

### Treatment of Subjects

[0458] Any of the compositions provided herein may be administered to an individual. “Individual” may be used interchangeably with “subject” or “patient.” An individual may be a mammal, for example a human or animal such as a non-human primate, a rodent, a rabbit, a rat, a mouse, a horse, a donkey, a goat, a cat, a dog, a cow, a pig, or a sheep. In some embodiments, the individual is a human. In some embodiments, the individual is a fetus, an embryo, or a child. In other embodiments, the individual may be another eukaryotic organism, such as a plant. In some embodiments, the compositions provided herein are administered to a cell ex vivo.

[0459] In some embodiments, the compositions provided herein are administered to an individual as a method of treating a disease or disorder. In some embodiments, the individual has a genetic disease, such as any of the diseases described herein. In some embodiments, the individual is at risk of having the disease, such as any of the diseases described herein. In some embodiments, the individual is at increased risk of having a disease or disorder caused by insufficient amount of a protein or insufficient activity of a protein. In some embodiments, if an individual is “at an increased risk” of having a disease or disorder caused by insufficient amount of a protein or insufficient activity of a protein, the method involves preventative or prophylactic treatment. For example, an individual may be at an increased risk of having such a disease or disorder because of family history of the disease. Typically, individuals at an increased risk of having such a disease or disorder benefit from prophylactic treatment (e.g., by preventing or delaying the onset or progression of the disease or disorder). In some embodiments, a fetus is treated in utero, e.g., by administering the ASO composition to the fetus directly or indirectly (e.g., via the mother).

[0460] Suitable routes for administration of ASOs of the present invention may vary depending on cell type to which delivery of the ASOs is desired. Multiple tissues and organs can be affected by autosomal dominant mental retardation. In some embodiments, the liver can be the most significantly affected tissue. The ASOs of the present invention may be administered to patients parenterally, for example, by intrathecal injection, intracerebroventricular injection, intraperitoneal injection, intramuscular injection, subcutaneous injection, or intravenous injection.

Methods of Identifying Additional ASOs that Prevent Alternative Splicing.

[0461] Also within the scope of the present disclosure are methods for identifying or determining ASOs that prevent alternative splicing of a SYNGAP1 pre-mRNA. For example, a method can comprise identifying or determining ASOs that prevent alternative splicing of a SYNGAP1 pre-mRNA. Also within the scope of the present disclosure are methods for identifying or determining ASOs that prevent alternative splicing of a target pre-mRNA, wherein the target is SYNGAP1. For example, a method can comprise identifying or determining ASOs that prevent alternative splicing of a target pre-mRNA. ASOs that specifically hybridize to different nucleotides within the target region of the pre-mRNA may be screened to identify or determine ASOs that improve the extent of canonical splicing. In some embodiments, the ASO may block or interfere with the binding site(s) of a splicing silencer. Any method known in the art may be used to identify (determine) an ASO that when hybridized to the target region of the NSAE results in the desired effect (e.g., exon inclusion, protein or functional RNA production). These methods also can be used for identifying ASOs that prevent alternative splicing of the NSAE by binding to a targeted region in an intron flanking the NSAE. An example of a method that may be used is provided below.

[0462] A round of screening, referred to as an ASO “walk” may be performed using ASOs that have been designed to hybridize to a target region of a pre-mRNA. For example, the ASOs used in the ASO walk can be tiled every 5 nucleotides from approximately 100 nucleotides upstream of the 3′ splice site of the NSAE (e.g., a portion of sequence of the intron located upstream of the target/NSAE) to approximately 100 nucleotides downstream of the 3′ splice site of the target/NSAE and/or from approximately 100 nucleotides upstream of the 5′ splice site of the NSAE to approximately 100 nucleotides downstream of the 5′ splice site of the target/NSAE (e.g., a portion of sequence of the intron located downstream of the target/NSAE). For example, a first ASO of 18 nucleotides in length may be designed to specifically hybridize to nucleotides +6 to +23 relative to the 5′ splice site of the target/NSAE. A second ASO is designed to specifically hybridize to nucleotides +11 to +28 relative to the 5′ splice site of the target/NSAE. ASOs are designed as such spanning the target region of the pre-mRNA. In some embodiments, the ASOs can be tiled more closely, e.g., every 1, 2, 3, or 4 nucleotides. Further, the ASOs can be tiled from 100 nucleotides downstream of the 5′ splice site, to 100 nucleotides upstream of the 3′ splice site. In some embodiments, the ASOs can be tiled from about 572 nucleotides upstream of the 3′ splice site, to about 500 nucleotides downstream of the 5′ splice site. In some embodiments, the ASOs can be tiled from about 500 nucleotides upstream of the 3′ splice site, to about 572 nucleotides downstream of the 3′ splice site.

[0463] One or more ASOs, or a control ASO (an ASO with a scrambled sequence, sequence that is not expected to hybridize to the target region) are delivered, for example by transfection, into a disease-relevant cell line that expresses the target pre-mRNA (e.g., a NSAE pre-mRNA described herein). The canonical splicing promoting effects of each of the ASOs may be assessed by any method known in the art, for example by reverse transcriptase (RT)-PCR using primers, such as primers spanning the region containing the NSAE or canonical exon. A decrease or absence of a longer or shorter RT-PCR product than a canonical exon produced using primers spanning the region containing the NSAE or canonical exon in ASO-treated cells as compared to in control ASO-treated cells indicates that exclusion of the NSAE has been increased. In some embodiments, the canonical splicing efficiency or the ratio of canonically spliced mRNA to NSAE containing mRNA may be improved using the ASOs described herein. The amount of protein or functional RNA that is encoded by the target pre-mRNA can also be assessed to determine whether each ASO achieved the desired effect (e.g., enhanced functional protein production). Any method known in the art for assessing and/or quantifying protein production, such as Western blotting, flow cytometry, immunofluorescence microscopy, and ELISA, can be used.

[0464] A second round of screening, referred to as an ASO “micro-walk” may be performed using ASOs that have been designed to hybridize to a target region of a pre-mRNA. The ASOs used in the ASO micro-walk are tiled every 1 nucleotide to further refine the nucleotide acid sequence of the pre-mRNA that when hybridized with an ASO results in modulation of NSAE exclusion.

[0465] Regions defined by ASOs that promote inclusion target NSAE are explored in greater detail by means of an ASO “micro-walk”, involving ASOs spaced in 1-nt steps, as well as longer ASOs, typically 15-25 nt.

[0466] As described for the ASO walk above, the ASO micro-walk is performed by delivering one or more ASOs, or a control ASO (an ASO with a scrambled sequence, sequence that is not expected to hybridize to the target region), for example by transfection, into a disease-relevant cell line that expresses the target pre-mRNA. The splicing-inducing effects of each of the ASOs may be assessed by any method known in the art, for example by reverse transcriptase (RT)-PCR using primers that span the NSAE, as described herein. A decrease or absence of a longer or shorter RT-PCR product than a canonical exon produced using primers spanning the region containing the NSAE or canonical exon in ASO-treated cells as compared to in control ASO-treated cells indicates that exclusion of the NSAE has been increased. In some embodiments, the canonical splicing efficiency or the ratio of canonically spliced mRNA to retained NSAE containing mRNA may be improved using the ASOs described herein. The amount of protein or functional RNA that is encoded by the target pre-mRNA can also be assessed to determine whether each ASO achieved the desired effect (e.g., enhanced functional protein production). Any method known in the art for assessing and/or quantifying protein production, such as Western blotting, flow cytometry, immunofluorescence microscopy, and ELISA, can be used.

[0467] ASOs that when hybridized to a region of a pre-mRNA result in canonical splicing and increased protein production may be tested in vivo using animal models, for example transgenic mouse models in which the full-length human gene has been knocked-in or in humanized mouse models of disease. Suitable routes for administration of ASOs may vary depending on the disease and/or the cell types to which delivery of the ASOs is desired. ASOs may be administered, for example, by intrathecal injection, intracerebroventricular injection, intraperitoneal injection, intramuscular injection, subcutaneous injection, or intravenous injection. Following administration, the cells, tissues, and/or organs of the model animals may be assessed to determine the effect of the ASO treatment by for example evaluating splicing (efficiency, rate, extent) and protein production by methods known in the art and described herein. The animal models may also be any phenotypic or behavioral indication of the disease or disease severity.

### Combinational Therapy

[0468] In some embodiments, provided herein is a composition comprising one or more NSAE-modulating agents. In some embodiments, provided herein is a composition comprising two or more NSAE-modulating agents. In some embodiments, provided herein is a composition comprising one or more ASO complementary to a targeted region of SynGAP1 pre-mRNA. In some embodiments, provided herein is a composition comprising two or more ASO complementary to a targeted region of SynGAP1 pre-mRNA. In some embodiments, provided herein is a composition comprising one or more ASO complementary to a same targeted region of SynGAP1 pre-mRNA. In some embodiments, provided herein is a composition comprising two or more ASO complementary to a same targeted region of SynGAP1 pre-mRNA. In some embodiments, provided herein is a composition comprising one or more ASO complementary to different targeted regions of SynGAP1 pre-mRNA. In some embodiments, provided herein is a composition comprising two or more ASO complementary to different targeted regions of SynGAP1 pre-mRNA. In some embodiments, provided herein is a composition comprising one or more ASOs of Table 1. In some embodiments, provided herein is a composition comprising two and more ASOs of in Table 1. In some embodiments, provided herein is a composition comprising one or more ASOs selected from the sequences of Table 1 and Table 2. In some embodiments, provided herein is a composition comprising two and more ASOs selected from the sequences of Table 1 and Table 2.

[0469] In some embodiments, provided herein is a composition comprising one or more ASO complementary to a targeted region of a target pre-mRNA, wherein the target is SYNGAP1. In some embodiments, provided herein is a composition comprising two or more ASO complementary to a targeted region of a target pre-mRNA. In some embodiments, provided herein is a composition comprising one or more ASO complementary to a same targeted region of a target pre-mRNA. In some embodiments, provided herein is a composition comprising two or more ASO complementary to a same targeted region of a target pre-mRNA. In some embodiments, provided herein is a composition comprising one or more ASO complementary to different targeted regions of a target pre-mRNA. In some embodiments, provided herein is a composition comprising two or more ASO complementary to different targeted regions of a target pre-mRNA. In some embodiments, provided herein is a composition comprising two or more ASO complementary to a targeted region of two or more target pre-mRNAs. In some embodiments, provided herein is a composition comprising two or more ASO complementary to a targeted region of two or more different target pre-mRNAs.

[0470] In some aspects, provided herein is a method of modulating expression of a target protein by administering the compositions as described above. In some aspects, provided herein is a pharmaceutical composition comprising a therapeutic agent comprising the composition as described above; and a pharmaceutically acceptable excipient and/or a delivery vehicle. In some aspects, provided herein is a method of treating or preventing a disease or condition in a subject in need thereof, the method comprising: administering to the subject a pharmaceutical composition comprising a therapeutic agent comprising the composition as described above; and a pharmaceutically acceptable excipient and/or a delivery vehicle. In some aspects, provided herein is a method of treating or preventing a disease or condition in a subject in need thereof, the method comprising: administering to the subject the composition as described above. In some aspects, provided herein is a method of treating a disease or condition in a subject in need thereof by modulating expression of a target protein in a cell of the subject through administering to the subject a pharmaceutical composition comprising a therapeutic agent comprising the composition as described above; and a pharmaceutically acceptable excipient and/or a delivery vehicle. In some aspects, provided herein is a method of treating a disease or condition in a subject to the subject in need thereof by modulating expression of a target protein in a cell of the subject through administering to the subject the composition as described above. In some aspects, provided herein is a therapeutic agent for use in a method described herein. In some aspects, provided herein is a pharmaceutical composition comprising a therapeutic agent described herein and a pharmaceutically acceptable excipient.

[0471] The present invention will be more specifically illustrated by the following Examples. However, it should be understood that the present invention is not limited by these examples in any manner.

### EXAMPLES

### Example 1: Identification of NMD-Inducing Alternative Splicing Events in Transcripts by RNAseq Using Next-Generation Sequencing

[0472] Non-productive AS events in organs known to be accessible by ASOs were identified by analyzing 83 publicly available RNA-sequencing (RNA-seq) datasets from human liver, kidney, central nervous system (CNS), and eye tissues. Computational analysis discovered 7,819 unique genes containing a total of 13,121 non-productive AS events of various types. By cross-referencing these genes with genetic disease databases such as Orphanet (www.orpha.net/), 1,265 disease-associated genes with non-productive AS events were identified. As many NMD-sensitive transcripts are efficiently degraded in the analyzed tissues and are not detectable by RNAseq, there are many more genes with non-productive AS events than have been identified to date. To prove the TANGO concept, four genes from the bioinformatic analysis representing three types of targets (haploinsufficiency, autosomal recessive and pathway associated with disease), three organs (liver, CNS, and eye), and three types of alternative splicing events (cassette exon, alternative splice site, and alternative intron) were selected.

### Example 2: Confirmation of Alternative Splicing Via Cycloheximide Treatment

[0473] To validate the in-silico predictions and to quantify the abundance of potentially targetable non-productive AS events, cells were treated with cycloheximide (CHX), a translation inhibitor known to inhibit NMD. Expectedly, reverse transcriptase (RT)-PCR analysis showed a consistent increase in the predicted non-productive SYNGAP1 splicing events in various cell lines upon CHX treatment compared to DMSO-treated cells. The increase indicates that these non-productive AS events lead to transcript degradation by NMD.

### Example 3: SYNGAP1 Exon Region ASO Walk

[0474] To identify ASOs that can prevent the non-productive AS events, an initial systematic ASO walk was performed in 5-nt steps along the AS event of interest. These ASOs have a uniform phosphorothioate backbone and methoxyethyl at the 2′ ribose position (2′MOE-PS). These modifications were previously shown to allow binding to RNA with high affinity and to confer resistance to both nucleases and RNase H cleavage of the target RNA-ASO complex. RT-PCR analysis from transfected HEK293 cells identified several ASOs that reduce AS in the SYNGAP1 mRNA and increase productive mRNA. The observed increase in SYNGAP1 productive mRNA was confirmed by TaqMan qPCR. The fold change of AS may be plotted vs the increase in productive mRNA (qPCR) to demonstrate that the ASOs are functioning on mechanism. These results strongly suggest that gene expression upregulation can be achieved by preventing non-productive AS with ASOs.

### Example 4: Use of ASO's to Increase Cellular Protein Expression in a Dose-Dependent Manner

[0475] As the desirable upregulation level varies among target genes and diseases, selected positive ASO hits from the initial walks were used to determine whether the increase in productive mRNA can be titrated across non-productive AS events. SYNGAP1 ASO-55 was transfected in cells at increasing concentrations to demonstrate dose-dependent upregulation. The concentration was selected based on the potency of the ASO. RT-PCR results showed a dose-dependent decrease of the non-productive alternative 3′ss selection in SYNGAP1 compared to a non-targeting ASO control transfected at the same respective doses. Conversely, a dose-dependent increase in productive mRNA was observed as measured by TaqMan qPCR compared to a non-targeting ASO control. To determine whether the observed upregulation in productive mRNAs translates to a dose-dependent increase in protein levels, SynGAP proteins were measured in extracts from transfected cells with increasing concentrations of targeting ASOs. First, antibodies against SynGAP were validated by short interfering (si)RNA-mediated knockdown of protein expression and western blot analysis. Immunoblotting results of extracts from cells transfected with the selected ASOs showed a dose-dependent increase in SynGAP proteins. The level of protein upregulation resulting from the highest ASO concentrations ranged between 1.6- to 2-fold. A non-targeting ASO control had no significant effect on protein levels. Altogether, the data indicate that ASOs targeting various types of non-productive AS events lead to a titratable increase in productive mRNA resulting in an increase in protein expression. The titratable nature of TANGO ASO-mediated protein upregulation suggests that one could tightly control protein levels and reduce the risk of overexpression. This aspect of the TANGO technology makes it especially suited to address autosomal dominant haploinsufficient diseases.

### Example 5: Effects of ASOs on Productive and Nonproductive mRNA Levels

[0476] ASOs of different lengths and nucleobase chemistries were tested via RT-PCR analysis from transfected HEK293 cells to identify the effects of the ASO length and nucleobase chemistries on the decrease in nonproductive SYNGAP1 mRNA and increase in productive SYNGAP1 mRNA. FIG. 1 depicts TaqMan qPCR results for productive mRNA and RT-PCR results for nonproductive mRNA using RNA extracted from HEK293 cells 24 hrs after transfection with 80 nM of the indicated ASOs from an alternative 3′ splice site macrowalk. The exemplary TaqMan probe spans across exon 10 and the junction of exon 11 and measures productive mRNA. FIG. 2 depicts TaqMan qPCR results for productive mRNA and RT-PCR results for nonproductive mRNA using RNA extracted from HEK293 cells 24 hrs after transfection with 80 nM of the indicated ASOs from an alternative 3′ splice site microwalk. The exemplary TaqMan probe spans across exon 10 and the junction of exon 11 and measures productive mRNA. FIG. 3 depicts TaqMan qPCR results for productive mRNA and RT-PCR results for nonproductive mRNA using RNA extracted from HEK293 cells 24 hrs after transfection with 80 nM of the indicated ASOs. The exemplary TaqMan probe spans across exon 10 and the junction of exon 11 and measures productive mRNA. FIG. 4 depicts RT-PCR results for nonproductive mRNA using RNA extracted from HEK293 cells 24 hrs after they were transfected with 80 nM of the indicated ASOs. FIG. 5 depicts RT-PCR results for nonproductive mRNA using RNA extracted from HEK293 cells 24 hrs after transfection with 80 nM of the indicated ASOs (upper panel), or RNA extracted from HEK293 cells 72 hours after the cells were allowed to freely uptake 20 μM of the indicated ASOs in 3D culture (lower panel). FIG. 6 depicts RT-PCR results for dose-responsive decrease of nonproductive mRNA using RNA from HEK293 cells. Cells were treated with increasing concentrations of the indicated ASOs and evaluated 72 hours after they were allowed to freely uptake the ASOs in 3D culture. The abundance of the Exon 18X-containing transcripts was plotted against the logarithmic value (log 10) of the ASO dose using a nonlinear regression fit of a variable slope, four-parameter dose-response curve as calculated by GraphPad Prism 8. Biological replicates were plotted for each concentration with standard deviation (S.D.) indicated. The values of the control group comprising no ASO were used to plot the upper end of the curve at a concentration representative of 0 μM. Some of the projected curve analysis used constrain between 0 and 0.05. The EC50 and log EC50 values were calculated by GraphPad Prism 8. FIG. 7 depicts RT-PCR results for nonproductive mRNA using RNA extracted from HEK293 cells 24 hrs after transfection with 80 nM of the indicated ASOs (upper panel), or RNA extracted from HEK293 cells 72 hours after the cells were allowed to freely uptake 20 μM of the indicated ASOs in 3D culture (lower panel). FIG. 8 depicts RT-PCR results for dose-responsive decrease of nonproductive mRNA using RNA from HEK293 cells. Cells were treated with increasing concentrations of the indicated ASOs and evaluated 72 hours after they were allowed to freely uptake the ASOs in 3D culture. The abundance of the Exon 18X-containing transcripts was plotted against the logarithmic value (log 10) of the ASO dose using a nonlinear regression fit of a variable slope four parameter dose-response curve as calculated by GraphPad Prism 8. Biological replicates were plotted for each concentration with standard deviation (S.D.) indicated. The values of the control group comprising no ASO were used to plot the upper end of the curve at a concentration representative of 0 μM. Some of the projected curve analysis used constraints between 0 and 0.05. The EC50 and log EC50 values were calculated by GraphPad Prism 8.

### Example 6: In Vivo Data for ASOs Targeting E18X-Hippocampus

[0477] FIG. 9 depicts RT-PCR results for nonproductive mRNA and results using a ProteinSimple Jess assay to detect the alpha 1 (a1) isoform of SYNGAP1. 20 mg of indicated ASO was intracerebroventricularly injected (ICV) into P2 Syngap1 heterozygous (Syngap1^{+/-}) mice. Four weeks later, brains were dissected, and their hippocampi were assayed for Exon 18X inclusion by RT-PCR. The levels of the a1-isoform of SYNGAP1 protein were normalized to total protein via a ProteinSimple JESS assay.

### Example 7: Evaluation of In Vivo ASO Target Engagement and Corresponding Changes in SYNGAP1 Protein Expression Levels in Various Brain Regions of a Syngap1^{+/-} Mouse Model

[0478] Male and female Syngap1 heterozygous (Syngap1^{+/-}) mouse pups received intracerebroventricular injections of various amounts (3 μg, 10 μg, 20 μg, and 30 μg) of four different ASO compounds (compounds mm59, mm60, mm61, and mm62) (Table 8) on postnatal day 2 (PND2). Mouse brains were collected four weeks after ASO treatment and dissected such that ASO target engagement was analyzed in regions from the brain's left hemisphere and SYNGAP1 protein expression levels were analyzed in regions from the brain's right hemisphere.

[0479] After treatment with various ASO compounds, Exon 18X levels were measured by quantitative RT-PCR of exons 18-19. ASO target engagement was evaluated as the fold change in nonproductive mRNA normalized to mitochondrial ribosomal protein L16 (MRPL16) RNA. Protein levels were measured by capillary immuno-electrophoresis via ProteinSimple JESS assays. Effective ASO-mediated target engagement was measured as a decrease in Exon 18X inclusion and increase in protein levels of the alpha 1 (a1) isoform of SYNGAP1. The levels of the a1-isoform of SYNGAP1 protein were normalized to Actin. PBS was used as a negative control.

TABLE 8
Exemplary ASOs targeting the NMD Exon 18x event in mice and humans

| | Mouse Sequence | | Human Sequence |
|---|---|---|---|
| | (Bold = 2′ MOE, | | (Bold = 2′ MOE, |
| | Underlined C = 5methylC | | Underlined C = 5methylC |
| Mouse ASO | Bold and italicized = 2′-Fluoro) | Human ASO | Bold and italicized = 2′-Fluoro) |
| ID | (Sequence 5′→3′) | ID | (Sequence 5′→3′) |
| mm59 | GTCAAAGCGGAACCAG (SEQ | 59 | GCCAAAGCGGAACCAG (SEQ |
| | ID NO: 275) | | ID NO: 253) |
| mm60 | GTCAAAGCGGAACCAG (SEQ | 59-3 | GCCAAAGCGGAACCAG (SEQ |
| | ID NO: 282) | | ID NO: 256) |
| mm61 | GTCAAAGCGGAACCAG (SEQ | 59-8 | GCCAAAGCGGAACCAG (SEQ |
| | ID NO: 283) | | ID NO: 285) |
| mm62 | GTCAAAGCGGAACCAG (SEQ | 59-9 | GCCAAAGCGGAACCAG (SEQ |
| | ID NO: 284) | | ID NO: 17) |

### Cerebral Cortex

[0480] All four tested compounds resulted in an observable, dose-responsive decrease in nonproductive mRNA levels such that higher doses of each ASO resulted in greater decreases in nonproductive mRNA (FIG. 10A) in the cerebral cortex. ASO compound mm59 delivered intracerebroventricularly at 30 μg resulted in a decrease of nonproductive mRNA to about 0.3-fold of PBS-treated Syngap1^{+/-} mice. ASO compound mm60 delivered intracerebroventricularly at 20 μg resulted in a decrease of nonproductive mRNA to about 0.5-fold of PBS-treated Syngap1^{+/-} mice. ASO compound mm61 delivered intracerebroventricularly at 30 μg resulted in a decrease of nonproductive mRNA to about 0.3-fold of PBS-treated Syngap1^{+/-} mice. ASO compound mm62 delivered intracerebroventricularly at 30 μg resulted in a decrease of nonproductive mRNA to about 0.2-fold of PBS-treated Syngap1^{+/-} mice.

[0481] Levels of SynGAP a1 protein in the cerebral cortex after treatment of the Syngap1^{+/-} mice with the four ASO compounds are illustrated in FIG. 10B. ASO compound mm60 delivered intracerebroventricularly at 20 μg and 30 μg resulted in respective increases of the a1 SYNGAP1 protein isoform to about 1.15-fold and about 1.3-fold relative to PBS-treated Syngap1^{+/-} mice. ASO compound mm61 delivered intracerebroventricularly at 3 μg and 30 μg resulted in respective increases of the a1 SYNGAP1 protein isoform to about 1.1-fold and about 1.05-fold relative to PBS-treated Syngap1^{+/-} mice. ASO compound mm62 delivered intracerebroventricularly at 20 μg and 30 μg both resulted in increases of the a1 SYNGAP1 protein isoform to about 1.1-fold relative to PBS-treated Syngap1^{+/-} mice.

### Hippocampus

[0482] All four tested compounds resulted in an observable, dose-responsive decrease in nonproductive mRNA levels such that higher doses of each ASO resulted in greater decreases in nonproductive mRNA (FIG. 11A) in the hippocampus. ASO compound mm59 delivered intracerebroventricularly at both 10 μg and 20 μg resulted in a decrease of nonproductive mRNA to about 0.4-fold of PBS-treated Syngap1^{+/-} mice. ASO compound mm59 delivered intracerebroventricularly at 30 μg resulted in a decrease of nonproductive mRNA to about 0.3-fold of PBS-treated Syngap1^{+/-} mice. ASO compound mm60 delivered intracerebroventricularly at both 20 μg and 30 μg resulted in a decrease of nonproductive mRNA to about 0.5-fold of PBS-treated Syngap1^{+/-} mice. ASO compound mm61 delivered intracerebroventricularly at both 20 μg and 30 μg resulted in a decrease of nonproductive mRNA to about 0.5-fold of PBS-treated Syngap1^{+/-} mice. ASO compound mm62 delivered intracerebroventricularly at both 20 μg and 30 μg resulted in a decrease of nonproductive mRNA to about 0.4-fold of PBS-treated Syngap1^{+/-} mice.

[0483] Levels of SynGAP a1 protein in the hippocampus after treatment of the Syngap1^{+/-} mice with the four ASO compounds are illustrated in FIG. 11B. ASO compound mm60 delivered intracerebroventricularly at 3 μg, 10 μg, and 30 μg all resulted in increases of the a1 SYNGAP1 protein isoform to about 1.05-fold relative to PBS-treated Syngap1^{+/-} mice. ASO compound mm61 delivered intracerebroventricularly at 20 μg and 30 μg resulted in respective increases of the a1 SYNGAP1 protein isoform to about 1.1-fold and about 1.5-fold relative to PBS-treated Syngap1^{+/-} mice.

### Midbrain

[0484] All four tested compounds resulted in an observable, dose-responsive decrease in nonproductive mRNA levels such that higher doses of each ASO resulted in greater decreases in nonproductive mRNA (FIG. 12A) in the midbrain. ASO compound mm59 delivered intracerebroventricularly at 10 μg, 20 μg, and 30 μg resulted in a decrease of nonproductive mRNA to about 0.4-fold of PBS-treated Syngap1^{+/-} mice. ASO compound mm60 delivered intracerebroventricularly at 10 μg, 20 μg, and 30 μg resulted in a decrease of nonproductive mRNA to about 0.5-fold of PBS-treated Syngap1^{+/-} mice. ASO compound mm61 delivered intracerebroventricularly at 10 μg, 20 μg, and 30 μg resulted in a decrease of nonproductive mRNA to about 0.45-fold of PBS-treated Syngap1^{+/-} mice. ASO compound mm62 delivered intracerebroventricularly at 10 μg, 20 μg, and 30 μg resulted in a decrease of nonproductive mRNA to about 0.55-fold of PBS-treated Syngap1^{+/-} mice.

[0485] Levels of SynGAP a1 protein in the midbrain after treatment of the Syngap1^{+/-} mice with the four ASO compounds are illustrated in FIG. 12B. ASO compound mm59 delivered intracerebroventricularly at 20 μg and 30 μg resulted in increases of the a1 SYNGAP1 protein isoform to about 1.2-fold and 1.25-fold relative to PBS-treated Syngap1^{+/-} mice.

### Basal Ganglia/Thalamus

[0486] All four tested compounds resulted in an observable, dose-responsive decrease in nonproductive mRNA levels such that higher doses of each ASO resulted in greater decreases in nonproductive mRNA (FIG. 13A) in the basal ganglia/thalamus. ASO compound mm59 delivered intracerebroventricularly at 3 μg, 10 μg, 20 μg, and 30 μg resulted in a decrease of nonproductive mRNA to about 0.4-fold of PBS-treated Syngap1^{+/-} mice. ASO compound mm60 delivered intracerebroventricularly at 3 μg resulted in a decrease of nonproductive mRNA to about 0.5-fold of PBS-treated Syngap1^{+/-} mice. ASO compound mm60 delivered intracerebroventricularly at 10 μg, 20 μg, and 30 μg resulted in a decrease of nonproductive mRNA to about 0.4-fold of PBS-treated Syngap1^{+/-} mice. ASO compound mm61 delivered intracerebroventricularly at 3 μg resulted in a decrease of nonproductive mRNA to about 0.4-fold of PBS-treated Syngap1^{+/-} mice. ASO compound mm61 delivered intracerebroventricularly at 10 μg, 20 μg, and 30 μg resulted in a decrease of nonproductive mRNA to about 0.2-fold of PBS-treated Syngap1^{+/-} mice. ASO compound mm62 delivered intracerebroventricularly at 3 μg, 10 μg, 20 μg, and 30 μg resulted in respective decreases of nonproductive mRNA to about 0.3-fold, about 0.2-fold, about 0.35-fold, and about 0.1-fold of PBS-treated Syngap1^{+/-} mice.

[0487] Levels of SynGAP a1 protein in the basal ganglia/thalamus after treatment of the Syngap1^{+/-} mice with the four ASO compounds are illustrated in FIG. 13B. ASO compound mm59 delivered intracerebroventricularly at 10 μg and 30 μg both resulted in increases of the a1 SYNGAP1 protein isoform to about 1.2-fold relative to PBS-treated Syngap1^{+/-} mice. ASO compound mm61 delivered intracerebroventricularly at 20 μg resulted in an increase of the a1 SYNGAP1 protein isoform to about 1.2-fold relative to PBS-treated Syngap1^{+/-} mice.

[0488] The signal-to-noise ratio for protein was higher in the midbrain and basal ganglia/thalamus, which may contribute to more variability in the observed responses to ASO treatment.

### Syngap1 ASO Activity Comparisons by EC50s in Mouse Cortical Neurons (MCNs)

[0489] Quantitative RT-PCRs were run for mRNA extracted from wild-type Mouse Cortical Neurons (MCNs) after treatment with various ASOs (FIGS. 14A-14C) at five different concentrations. Dose-responsive decreases of nonproductive mRNA were observed. Cells were treated with increasing concentrations of the indicated ASOs and allowed to freely uptake the ASOs in 3D culture for 72 hours. The fold change of the Exon18X-containing transcripts/gamma for individual ASO concentrations was plotted against the logarithmic value (log 10) of the ASO dose using a nonlinear regression fit of a variable slope four parameter dose-response curve as calculated by GraphPad Prism 8. Biological replicates were plotted for each of the five different ASO concentrations (4-6 replicates/concentration) with standard deviation (S.D.) indicated. The EC50 and log EC50 values were calculated by GraphPad Prism 8.

TABLE 9
Syngap1 ASO activity comparisons by EC50s in MCNs

| | | Confidence | Hill | |
|---|---|---|---|---|
| ASO | EC50 (μM)¹ | interval ² | coefficient³ | N⁴ |
| mm59 | 0.34 | (0.21-0.55) | 0.53 | 3 |
| mm60 | 0.06 | (0.02-0.20) | 0.43 | 3 |
| mm61 | 0.13 | (0.02-1.1) | 0.44 | 3 |
| mm62 | 0.28 | nd | 0.80 | 1 |

¹Geometric mean of EC50;
² 95% confidence interval of EC50 mean;
³Means of Hill coefficients;
⁴Number of independent experiments on separate isolations and days.

[0490] While preferred embodiments of the present invention have been shown and described herein, it will be obvious to those skilled in the art that such embodiments are provided by way of example only. Numerous variations, changes, and substitutions will now occur to those skilled in the art without departing from the invention. It should be understood that various alternatives to the embodiments of the invention described herein may be employed in practicing the invention. It is intended that the following claims define the scope of the invention and that methods and structures within the scope of these claims and their equivalents be covered thereby.

The application's sequence listing, which the Patent Office published only in electronic form, follows.

SEQUENCE LISTING (285 sequences)

SEQ ID NO: 1 - RNA, 18 nt, synthetic construct
  source 1..18: mol_type = other RNA
  modified_base 1: mod_base = OTHER; note = 2'-O-methoxyethyl modified thymine with phosphorothioate linkage
  modified_base 2: mod_base = OTHER; note = 2'-O-methoxyethyl modified nucleotide with phosphorothioate linkage
  modified_base 3: mod_base = OTHER; note = 2'-O-methoxyethyl modified nucleotide with phosphorothioate linkage
  modified_base 4: mod_base = OTHER; note = 2'-O-methoxyethyl modified 5-methylcytosine with phosphorothioate linkage
  modified_base 5: mod_base = OTHER; note = 2'-O-methoxyethyl modified 5-methylcytosine with phosphorothioate linkage
  modified_base 6: mod_base = OTHER; note = 2'-O-methoxyethyl modified nucleotide with phosphorothioate linkage
  modified_base 7: mod_base = OTHER; note = 2'-O-methoxyethyl modified nucleotide with phosphorothioate linkage
  modified_base 8: mod_base = OTHER; note = 2'-O-methoxyethyl modified nucleotide with phosphorothioate linkage
  modified_base 9: mod_base = OTHER; note = 2'-O-methoxyethyl modified nucleotide with phosphorothioate linkage
  modified_base 10: mod_base = OTHER; note = 2'-O-methoxyethyl modified 5-methylcytosine with phosphorothioate linkage
  modified_base 11: mod_base = OTHER; note = 2'-O-methoxyethyl modified nucleotide with phosphorothioate linkage
  modified_base 12: mod_base = OTHER; note = 2'-O-methoxyethyl modified nucleotide with phosphorothioate linkage
  modified_base 13: mod_base = OTHER; note = 2'-O-methoxyethyl modified nucleotide with phosphorothioate linkage
  modified_base 14: mod_base = OTHER; note = 2'-O-methoxyethyl modified nucleotide with phosphorothioate linkage
  modified_base 15: mod_base = OTHER; note = 2'-O-methoxyethyl modified 5-methylcytosine with phosphorothioate linkage
  modified_base 16: mod_base = OTHER; note = 2'-O-methoxyethyl modified 5-methylcytosine with phosphorothioate linkage
  modified_base 17: mod_base = OTHER; note = 2'-O-methoxyethyl modified nucleotide with phosphorothioate linkage
  modified_base 18: mod_base = OTHER; note = 2'-O-methoxyethyl modified nucleotide
tggccaaagcggaaccag

SEQ ID NO: 2 - RNA, 16 nt, synthetic construct
  source 1..16: mol_type = other RNA
  misc_difference 1: note = 2'-O-methoxyethyl or 2'-fluoro modified nucleotide with phosphorothioate linkage
  modified_base 2: mod_base = OTHER; note = 2'-O-methoxyethyl modified 5-methylcytosine with phosphorothioate linkage
  modified_base 3: mod_base = OTHER; note = 2'-O-methoxyethyl modified 5-methylcytosine with phosphorothioate linkage
  modified_base 4: mod_base = OTHER; note = 2'-O-methoxyethyl modified nucleotide with phosphorothioate linkage
  modified_base 5: mod_base = OTHER; note = 2'-O-methoxyethyl modified nucleotide with phosphorothioate linkage
  modified_base 6: mod_base = OTHER; note = 2'-O-methoxyethyl modified nucleotide with phosphorothioate linkage
  misc_difference 7: note = 2'-O-methoxyethyl or 2'-fluoro modified nucleotide with phosphorothioate linkage
  misc_difference 8: note = 5-Methylcytosine, 2'-fluoro modified cytosine, or 2'-fluoro modified 5-methylcytosine with phosphorothioate linkage
  misc_difference 9: note = 2'-O-methoxyethyl or 2'-fluoro modified nucleotide with phosphorothioate linkage
  misc_difference 10: note = 2'-O-methoxyethyl or 2'-O-methyl modified nucleotide with phosphorothioate linkage
  modified_base 11: mod_base = OTHER; note = 2'-O-methoxyethyl modified nucleotide with phosphorothioate linkage
  modified_base 12: mod_base = OTHER; note = 2'-O-methoxyethyl modified nucleotide with phosphorothioate linkage
  misc_difference 13: note = 5-Methylcytosine, 2'-fluoro modified cytosine, or 2'-fluoro modified 5-methylcytosine with phosphorothioate linkage
  modified_base 14: mod_base = OTHER; note = 2'-O-methoxyethyl modified 5-methylcytosine with phosphorothioate linkage
  modified_base 15: mod_base = OTHER; note = 2'-O-methoxyethyl modified nucleotide with phosphorothioate linkage
  misc_difference 16: note = 2'-O-methoxyethyl or 2'-fluoro modified nucleotide
gccaaagcggaaccag

SEQ ID NO: 3 - RNA, 16 nt, synthetic construct
  source 1..16: mol_type = other RNA
  modified_base 1: mod_base = OTHER; note = 2'-O-methoxyethyl modified 5-methylcytosine with phosphorothioate linkage
  modified_base 2: mod_base = OTHER; note = 2'-O-methoxyethyl modified thymine with phosphorothioate linkage
  modified_base 3: mod_base = OTHER; note = 2'-O-methoxyethyl modified thymine with phosphorothioate linkage
  modified_base 4: mod_base = OTHER; note = 2'-O-methoxyethyl modified 5-methylcytosine with phosphorothioate linkage
  modified_base 5: mod_base = OTHER; note = 2'-O-methoxyethyl modified nucleotide with phosphorothioate linkage
  modified_base 6: mod_base = OTHER; note = 2'-O-methoxyethyl modified 5-methylcytosine with phosphorothioate linkage
  modified_base 7: mod_base = OTHER; note = 2'-O-methoxyethyl modified nucleotide with phosphorothioate linkage
  modified_base 8: mod_base = OTHER; note = 2'-O-methoxyethyl modified nucleotide with phosphorothioate linkage
  modified_base 9: mod_base = OTHER; note = 2'-O-methoxyethyl modified 5-methylcytosine with phosphorothioate linkage
  modified_base 10: mod_base = OTHER; note = 2'-O-methoxyethyl modified 5-methylcytosine with phosphorothioate linkage
  modified_base 11: mod_base = OTHER; note = 2'-O-methoxyethyl modified nucleotide with phosphorothioate linkage
  modified_base 12: mod_base = OTHER; note = 2'-O-methoxyethyl modified nucleotide with phosphorothioate linkage
  modified_base 13: mod_base = OTHER; note = 2'-O-methoxyethyl modified 5-methylcytosine with phosphorothioate linkage
  misc_difference 14: note = 2'-O-methoxyethyl modified 5-methylcytosine with phosphorothioate linkage or absent; when absent, phosphorothioate linkage on previous base is absent
  misc_difference 15: note = 2'-O-methoxyethyl modified thymine with phosphorothioate linkage or absent; when absent, phosphorothioate linkage on previous base is absent
  misc_difference 16: note = 2'-O-methoxyethyl modified nucleotide or absent; when absent, phosphorothioate linkage on previous base is absent
cttcacgaccaacctg

SEQ ID NO: 4 - RNA, 16 nt, synthetic construct
  source 1..16: mol_type = other RNA
  modified_base 1: mod_base = OTHER; note = 2'-O-methoxyethyl modified thymine with phosphorothioate linkage
  modified_base 2: mod_base = OTHER; note = 2'-O-methoxyethyl modified 5-methylcytosine with phosphorothioate linkage
  modified_base 3: mod_base = OTHER; note = 2'-O-methoxyethyl modified nucleotide with phosphorothioate linkage
  modified_base 4: mod_base = OTHER; note = 2'-O-methoxyethyl modified 5-methylcytosine with phosphorothioate linkage
  modified_base 5: mod_base = OTHER; note = 2'-O-methoxyethyl modified nucleotide with phosphorothioate linkage
  modified_base 6: mod_base = OTHER; note = 2'-O-methoxyethyl modified nucleotide with phosphorothioate linkage
  modified_base 7: mod_base = OTHER; note = 2'-O-methoxyethyl modified 5-methylcytosine with phosphorothioate linkage
  modified_base 8: mod_base = OTHER; note = 2'-O-methoxyethyl modified 5-methylcytosine with phosphorothioate linkage
  modified_base 9: mod_base = OTHER; note = 2'-O-methoxyethyl modified nucleotide with phosphorothioate linkage
  modified_base 10: mod_base = OTHER; note = 2'-O-methoxyethyl modified nucleotide with phosphorothioate linkage
  modified_base 11: mod_base = OTHER; note = 2'-O-methoxyethyl modified 5-methylcytosine with phosphorothioate linkage
  modified_base 12: mod_base = OTHER; note = 2'-O-methoxyethyl modified 5-methylcytosine with phosphorothioate linkage
  modified_base 13: mod_base = OTHER; note = 2'-O-methoxyethyl modified thymine with phosphorothioate linkage
  modified_base 14: mod_base = OTHER; note = 2'-O-methoxyethyl modified nucleotide with phosphorothioate linkage
  modified_base 15: mod_base = OTHER; note = 2'-O-methoxyethyl modified 5-methylcytosine with phosphorothioate linkage
  modified_base 16: mod_base = OTHER; note = 2'-O-methoxyethyl modified nucleotide
tcacgaccaacctgca

SEQ ID NO: 5 - RNA, 15 nt, synthetic construct
  source 1..15: mol_type = other RNA
  modified_base 1: mod_base = OTHER; note = 2'-O-methoxyethyl modified nucleotide with phosphorothioate linkage
  modified_base 2: mod_base = OTHER; note = 2'-O-methoxyethyl modified nucleotide with phosphorothioate linkage
  modified_base 3: mod_base = OTHER; note = 2'-O-methoxyethyl modified 5-methylcytosine with phosphorothioate linkage
  modified_base 4: mod_base = OTHER; note = 2'-O-methoxyethyl modified thymine with phosphorothioate linkage
  modified_base 5: mod_base = OTHER; note = 2'-O-methoxyethyl modified thymine with phosphorothioate linkage
  modified_base 6: mod_base = OTHER; note = 2'-O-methoxyethyl modified thymine with phosphorothioate linkage
  modified_base 7: mod_base = OTHER; note = 2'-O-methoxyethyl modified nucleotide with phosphorothioate linkage
  modified_base 8: mod_base = OTHER; note = 2'-O-methoxyethyl modified 5-methylcytosine with phosphorothioate linkage
  modified_base 9: mod_base = OTHER; note = 2'-O-methoxyethyl modified nucleotide with phosphorothioate linkage
  modified_base 10: mod_base = OTHER; note = 2'-O-methoxyethyl modified nucleotide with phosphorothioate linkage
  modified_base 11: mod_base = OTHER; note = 2'-O-methoxyethyl modified 5-methylcytosine with phosphorothioate linkage
  modified_base 12: mod_base = OTHER; note = 2'-O-methoxyethyl modified 5-methylcytosine with phosphorothioate linkage
  modified_base 13: mod_base = OTHER; note = 2'-O-methoxyethyl modified nucleotide with phosphorothioate linkage
  modified_base 14: mod_base = OTHER; note = 2'-O-methoxyethyl modified nucleotide with phosphorothioate linkage
  modified_base 15: mod_base = OTHER; note = 2'-O-methoxyethyl modified 5-methylcytosine
ggctttacgaccaac

SEQ ID NO: 6 - RNA, 14 nt, synthetic construct
  source 1..14: mol_type = other RNA
  modified_base 1: mod_base = OTHER; note = 2'-O-methoxyethyl modified nucleotide with phosphorothioate linkage
  modified_base 2: mod_base = OTHER; note = 2'-O-methoxyethyl modified 5-methylcytosine with phosphorothioate linkage
  modified_base 3: mod_base = OTHER; note = 2'-O-methoxyethyl modified thymine with phosphorothioate linkage
  modified_base 4: mod_base = OTHER; note = 2'-O-methoxyethyl modified thymine with phosphorothioate linkage
  modified_base 5: mod_base = OTHER; note = 2'-O-methoxyethyl modified 5-methylcytosine with phosphorothioate linkage
  modified_base 6: mod_base = OTHER; note = 2'-O-methoxyethyl modified nucleotide with phosphorothioate linkage
  modified_base 7: mod_base = OTHER; note = 2'-O-methoxyethyl modified 5-methylcytosine with phosphorothioate linkage
  modified_base 8: mod_base = OTHER; note = 2'-O-methoxyethyl modified nucleotide with phosphorothioate linkage
  modified_base 9: mod_base = OTHER; note = 2'-O-methoxyethyl modified nucleotide with phosphorothioate linkage
  modified_base 10: mod_base = OTHER; note = 2'-O-methoxyethyl modified 5-methylcytosine with phosphorothioate linkage
  modified_base 11: mod_base = OTHER; note = 2'-O-methoxyethyl modified 5-methylcytosine with phosphorothioate linkage
  modified_base 12: mod_base = OTHER; note = 2'-O-methoxyethyl modified nucleotide with phosphorothioate linkage
  modified_base 13: mod_base = OTHER; note = 2'-O-methoxyethyl modified nucleotide with phosphorothioate linkage
  modified_base 14: mod_base = OTHER; note = 2'-O-methoxyethyl modified 5-methylcytosine
gcttcacgaccaac

SEQ ID NO: 7 - RNA, 18 nt, synthetic construct
  source 1..18: mol_type = other RNA
  modified_base 1: mod_base = OTHER; note = 2'-O-methoxyethyl modified nucleotide with phosphorothioate linkage
  modified_base 2: mod_base = OTHER; note = 2'-O-methoxyethyl modified 5-methylcytosine with phosphorothioate linkage
  modified_base 3: mod_base = OTHER; note = 2'-O-methoxyethyl modified nucleotide with phosphorothioate linkage
  modified_base 4: mod_base = OTHER; note = 2'-O-methoxyethyl modified thymine with phosphorothioate linkage
  modified_base 5: mod_base = OTHER; note = 2'-O-methoxyethyl modified nucleotide with phosphorothioate linkage
  modified_base 6: mod_base = OTHER; note = 2'-O-methoxyethyl modified nucleotide with phosphorothioate linkage
  modified_base 7: mod_base = OTHER; note = 2'-O-methoxyethyl modified nucleotide with phosphorothioate linkage
  modified_base 8: mod_base = OTHER; note = 2'-O-methoxyethyl modified nucleotide with phosphorothioate linkage
  modified_base 9: mod_base = OTHER; note = 2'-O-methoxyethyl modified nucleotide with phosphorothioate linkage
  modified_base 10: mod_base = OTHER; note = 2'-O-methoxyethyl modified nucleotide with phosphorothioate linkage
  modified_base 11: mod_base = OTHER; note = 2'-O-methoxyethyl modified nucleotide with phosphorothioate linkage
  modified_base 12: mod_base = OTHER; note = 2'-O-methoxyethyl modified nucleotide with phosphorothioate linkage
  modified_base 13: mod_base = OTHER; note = 2'-O-methoxyethyl modified nucleotide with phosphorothioate linkage
  modified_base 14: mod_base = OTHER; note = 2'-O-methoxyethyl modified nucleotide with phosphorothioate linkage
  modified_base 15: mod_base = OTHER; note = 2'-O-methoxyethyl modified thymine with phosphorothioate linkage
  modified_base 16: mod_base = OTHER; note = 2'-O-methoxyethyl modified nucleotide with phosphorothioate linkage
  modified_base 17: mod_base = OTHER; note = 2'-O-methoxyethyl modified nucleotide with phosphorothioate linkage
  modified_base 18: mod_base = OTHER; note = 2'-O-methoxyethyl modified nucleotide
acgtgggagagagatgga

SEQ ID NO: 8 - RNA, 18 nt, synthetic construct
  source 1..18: mol_type = other RNA
  modified_base 1: mod_base = OTHER; note = 2'-O-methoxyethyl modified nucleotide with phosphorothioate linkage
  modified_base 2: mod_base = OTHER; note = 2'-O-methoxyethyl modified nucleotide with phosphorothioate linkage
  modified_base 3: mod_base = OTHER; note = 2'-O-methoxyethyl modified nucleotide with phosphorothioate linkage
  modified_base 4: mod_base = OTHER; note = 2'-O-methoxyethyl modified nucleotide with phosphorothioate linkage
  modified_base 5: mod_base = OTHER; note = 2'-O-methoxyethyl modified 5-methylcytosine with phosphorothioate linkage
  modified_base 6: mod_base = OTHER; note = 2'-O-methoxyethyl modified nucleotide with phosphorothioate linkage
  modified_base 7: mod_base = OTHER; note = 2'-O-methoxyethyl modified 5-methylcytosine with phosphorothioate linkage
  modified_base 8: mod_base = OTHER; note = 2'-O-methoxyethyl modified nucleotide with phosphorothioate linkage
  modified_base 9: mod_base = OTHER; note = 2'-O-methoxyethyl modified thymine with phosphorothioate linkage
  modified_base 10: mod_base = OTHER; note = 2'-O-methoxyethyl modified nucleotide with phosphorothioate linkage
  modified_base 11: mod_base = OTHER; note = 2'-O-methoxyethyl modified nucleotide with phosphorothioate linkage
  modified_base 12: mod_base = OTHER; note = 2'-O-methoxyethyl modified nucleotide with phosphorothioate linkage
  modified_base 13: mod_base = OTHER; note = 2'-O-methoxyethyl modified nucleotide with phosphorothioate linkage
  modified_base 14: mod_base = OTHER; note = 2'-O-methoxyethyl modified nucleotide with phosphorothioate linkage
  modified_base 15: mod_base = OTHER; note = 2'-O-methoxyethyl modified nucleotide with phosphorothioate linkage
  modified_base 16: mod_base = OTHER; note = 2'-O-methoxyethyl modified nucleotide with phosphorothioate linkage
  modified_base 17: mod_base = OTHER; note = 2'-O-methoxyethyl modified nucleotide with phosphorothioate linkage
  modified_base 18: mod_base = OTHER; note = 2'-O-methoxyethyl modified nucleotide
gagacacgtgggagagag

SEQ ID NO: 9 - RNA, 18 nt, synthetic construct
  source 1..18: mol_type = other RNA
  modified_base 1: mod_base = OTHER; note = 2'-O-methoxyethyl modified 5-methylcytosine with phosphorothioate linkage
  modified_base 2: mod_base = OTHER; note = 2'-O-methoxyethyl modified thymine with phosphorothioate linkage
  modified_base 3: mod_base = OTHER; note = 2'-O-methoxyethyl modified nucleotide with phosphorothioate linkage
  modified_base 4: mod_base = OTHER; note = 2'-O-methoxyethyl modified 5-methylcytosine with phosphorothioate linkage
  modified_base 5: mod_base = OTHER; note = 2'-O-methoxyethyl modified thymine with phosphorothioate linkage
  modified_base 6: mod_base = OTHER; note = 2'-O-methoxyethyl modified thymine with phosphorothioate linkage
  modified_base 7: mod_base = OTHER; note = 2'-O-methoxyethyl modified nucleotide with phosphorothioate linkage
  modified_base 8: mod_base = OTHER; note = 2'-O-methoxyethyl modified nucleotide with phosphorothioate linkage
  modified_base 9: mod_base = OTHER; note = 2'-O-methoxyethyl modified nucleotide with phosphorothioate linkage
  modified_base 10: mod_base = OTHER; note = 2'-O-methoxyethyl modified nucleotide with phosphorothioate linkage
  modified_base 11: mod_base = OTHER; note = 2'-O-methoxyethyl modified nucleotide with phosphorothioate linkage
  modified_base 12: mod_base = OTHER; note = 2'-O-methoxyethyl modified nucleotide with phosphorothioate linkage
  modified_base 13: mod_base = OTHER; note = 2'-O-methoxyethyl modified nucleotide with phosphorothioate linkage
  modified_base 14: mod_base = OTHER; note = 2'-O-methoxyethyl modified nucleotide with phosphorothioate linkage
  modified_base 15: mod_base = OTHER; note = 2'-O-methoxyethyl modified nucleotide with phosphorothioate linkage
  modified_base 16: mod_base = OTHER; note = 2'-O-methoxyethyl modified nucleotide with phosphorothioate linkage
  modified_base 17: mod_base = OTHER; note = 2'-O-methoxyethyl modified nucleotide with phosphorothioate linkage
  modified_base 18: mod_base = OTHER; note = 2'-O-methoxyethyl modified 5-methylcytosine
ctgcttgaagaagagggc

SEQ ID NO: 10 - RNA, 18 nt, synthetic construct
  source 1..18: mol_type = other RNA
  modified_base 1: mod_base = OTHER; note = 2'-O-methoxyethyl modified thymine with phosphorothioate linkage
  modified_base 2: mod_base = OTHER; note = 2'-O-methoxyethyl modified thymine with phosphorothioate linkage
  modified_base 3: mod_base = OTHER; note = 2'-O-methoxyethyl modified 5-methylcytosine with phosphorothioate linkage
  modified_base 4: mod_base = OTHER; note = 2'-O-methoxyethyl modified 5-methylcytosine with phosphorothioate linkage
  modified_base 5: mod_base = OTHER; note = 2'-O-methoxyethyl modified nucleotide with phosphorothioate linkage
  modified_base 6: mod_base = OTHER; note = 2'-O-methoxyethyl modified nucleotide with phosphorothioate linkage
  modified_base 7: mod_base = OTHER; note = 2'-O-methoxyethyl modified nucleotide with phosphorothioate linkage
  modified_base 8: mod_base = OTHER; note = 2'-O-methoxyethyl modified nucleotide with phosphorothioate linkage
  modified_base 9: mod_base = OTHER; note = 2'-O-methoxyethyl modified nucleotide with phosphorothioate linkage
  modified_base 10: mod_base = OTHER; note = 2'-O-methoxyethyl modified nucleotide with phosphorothioate linkage
  modified_base 11: mod_base = OTHER; note = 2'-O-methoxyethyl modified 5-methylcytosine with phosphorothioate linkage
  modified_base 12: mod_base = OTHER; note = 2'-O-methoxyethyl modified nucleotide with phosphorothioate linkage
  modified_base 13: mod_base = OTHER; note = 2'-O-methoxyethyl modified thymine with phosphorothioate linkage
  modified_base 14: mod_base = OTHER; note = 2'-O-methoxyethyl modified nucleotide with phosphorothioate linkage
  modified_base 15: mod_base = OTHER; note = 2'-O-methoxyethyl modified 5-methylcytosine with phosphorothioate linkage
  modified_base 16: mod_base = OTHER; note = 2'-O-methoxyethyl modified thymine with phosphorothioate linkage
  modified_base 17: mod_base = OTHER; note = 2'-O-methoxyethyl modified nucleotide with phosphorothioate linkage
  modified_base 18: mod_base = OTHER; note = 2'-O-methoxyethyl modified nucleotide
ttccagggaacatgctga

SEQ ID NO: 11 - RNA, 18 nt, synthetic construct
  source 1..18: mol_type = other RNA
  modified_base 1: mod_base = OTHER; note = 2'-O-methoxyethyl modified nucleotide with phosphorothioate linkage
  modified_base 2: mod_base = OTHER; note = 2'-O-methoxyethyl modified nucleotide with phosphorothioate linkage
  modified_base 3: mod_base = OTHER; note = 2'-O-methoxyethyl modified 5-methylcytosine with phosphorothioate linkage
  modified_base 4: mod_base = OTHER; note = 2'-O-methoxyethyl modified nucleotide with phosphorothioate linkage
  modified_base 5: mod_base = OTHER; note = 2'-O-methoxyethyl modified 5-methylcytosine with phosphorothioate linkage
  modified_base 6: mod_base = OTHER; note = 2'-O-methoxyethyl modified 5-methylcytosine with phosphorothioate linkage
  modified_base 7: mod_base = OTHER; note = 2'-O-methoxyethyl modified nucleotide with phosphorothioate linkage
  modified_base 8: mod_base = OTHER; note = 2'-O-methoxyethyl modified nucleotide with phosphorothioate linkage
  modified_base 9: mod_base = OTHER; note = 2'-O-methoxyethyl modified nucleotide with phosphorothioate linkage
  modified_base 10: mod_base = OTHER; note = 2'-O-methoxyethyl modified nucleotide with phosphorothioate linkage
  modified_base 11: mod_base = OTHER; note = 2'-O-methoxyethyl modified nucleotide with phosphorothioate linkage
  modified_base 12: mod_base = OTHER; note = 2'-O-methoxyethyl modified nucleotide with phosphorothioate linkage
  modified_base 13: mod_base = OTHER; note = 2'-O-methoxyethyl modified nucleotide with phosphorothioate linkage
  modified_base 14: mod_base = OTHER; note = 2'-O-methoxyethyl modified nucleotide with phosphorothioate linkage
  modified_base 15: mod_base = OTHER; note = 2'-O-methoxyethyl modified nucleotide with phosphorothioate linkage
  modified_base 16: mod_base = OTHER; note = 2'-O-methoxyethyl modified 5-methylcytosine with phosphorothioate linkage
  modified_base 17: mod_base = OTHER; note = 2'-O-methoxyethyl modified nucleotide with phosphorothioate linkage
  modified_base 18: mod_base = OTHER; note = 2'-O-methoxyethyl modified nucleotide
gacaccagggagagacag

SEQ ID NO: 12 - RNA, 18 nt, synthetic construct
  source 1..18: mol_type = other RNA
  modified_base 1: mod_base = OTHER; note = 2'-O-methoxyethyl modified 5-methylcytosine with phosphorothioate linkage
  modified_base 2: mod_base = OTHER; note = 2'-O-methoxyethyl modified nucleotide with phosphorothioate linkage
  modified_base 3: mod_base = OTHER; note = 2'-O-methoxyethyl modified nucleotide with phosphorothioate linkage
  modified_base 4: mod_base = OTHER; note = 2'-O-methoxyethyl modified 5-methylcytosine with phosphorothioate linkage
  modified_base 5: mod_base = OTHER; note = 2'-O-methoxyethyl modified thymine with phosphorothioate linkage
  modified_base 6: mod_base = OTHER; note = 2'-O-methoxyethyl modified thymine with phosphorothioate linkage
  modified_base 7: mod_base = OTHER; note = 2'-O-methoxyethyl modified 5-methylcytosine with phosphorothioate linkage
  modified_base 8: mod_base = OTHER; note = 2'-O-methoxyethyl modified 5-methylcytosine with phosphorothioate linkage
  modified_base 9: mod_base = OTHER; note = 2'-O-methoxyethyl modified nucleotide with phosphorothioate linkage
  modified_base 10: mod_base = OTHER; note = 2'-O-methoxyethyl modified nucleotide with phosphorothioate linkage
  modified_base 11: mod_base = OTHER; note = 2'-O-methoxyethyl modified nucleotide with phosphorothioate linkage
  modified_base 12: mod_base = OTHER; note = 2'-O-methoxyethyl modified nucleotide with phosphorothioate linkage
  modified_base 13: mod_base = OTHER; note = 2'-O-methoxyethyl modified nucleotide with phosphorothioate linkage
  modified_base 14: mod_base = OTHER; note = 2'-O-methoxyethyl modified nucleotide with phosphorothioate linkage
  modified_base 15: mod_base = OTHER; note = 2'-O-methoxyethyl modified 5-methylcytosine with phosphorothioate linkage
  modified_base 16: mod_base = OTHER; note = 2'-O-methoxyethyl modified nucleotide with phosphorothioate linkage
  modified_base 17: mod_base = OTHER; note = 2'-O-methoxyethyl modified thymine with phosphorothioate linkage
  modified_base 18: mod_base = OTHER; note = 2'-O-methoxyethyl modified nucleotide
cagcttccagggaacatg

SEQ ID NO: 13 - RNA, 16 nt, synthetic construct
  source 1..16: mol_type = other RNA
  modified_base 1: mod_base = OTHER; note = 2'-O-methoxyethyl modified nucleotide with phosphorothioate linkage
  modified_base 2: mod_base = OTHER; note = 2'-O-methoxyethyl modified nucleotide with phosphorothioate linkage
  modified_base 3: mod_base = OTHER; note = 2'-O-methoxyethyl modified nucleotide with phosphorothioate linkage
  modified_base 4: mod_base = OTHER; note = 2'-O-methoxyethyl modified nucleotide with phosphorothioate linkage
  modified_base 5: mod_base = OTHER; note = 2'-O-methoxyethyl modified 5-methylcytosine with phosphorothioate linkage
  modified_base 6: mod_base = OTHER; note = 2'-O-methoxyethyl modified nucleotide with phosphorothioate linkage
  modified_base 7: mod_base = OTHER; note = 2'-O-methoxyethyl modified 5-methylcytosine with phosphorothioate linkage
  modified_base 8: mod_base = OTHER; note = 2'-O-methoxyethyl modified nucleotide with phosphorothioate linkage
  modified_base 9: mod_base = OTHER; note = 2'-O-methoxyethyl modified thymine with phosphorothioate linkage
  modified_base 10: mod_base = OTHER; note = 2'-O-methoxyethyl modified nucleotide with phosphorothioate linkage
  modified_base 11: mod_base = OTHER; note = 2'-O-methoxyethyl modified nucleotide with phosphorothioate linkage
  modified_base 12: mod_base = OTHER; note = 2'-O-methoxyethyl modified nucleotide with phosphorothioate linkage
  modified_base 13: mod_base = OTHER; note = 2'-O-methoxyethyl modified nucleotide with phosphorothioate linkage
  modified_base 14: mod_base = OTHER; note = 2'-O-methoxyethyl modified nucleotide with phosphorothioate linkage
  modified_base 15: mod_base = OTHER; note = 2'-O-methoxyethyl modified nucleotide with phosphorothioate linkage
  modified_base 16: mod_base = OTHER; note = 2'-O-methoxyethyl modified nucleotide
gagacacgtgggagag

SEQ ID NO: 14 - RNA, 16 nt, synthetic construct
  source 1..16: mol_type = other RNA
  modified_base 1: mod_base = OTHER; note = 2'-O-methoxyethyl modified 5-methylcytosine with phosphorothioate linkage
  modified_base 2: mod_base = OTHER; note = 2'-O-methoxyethyl modified nucleotide with phosphorothioate linkage
  modified_base 3: mod_base = OTHER; note = 2'-O-methoxyethyl modified 5-methylcytosine with phosphorothioate linkage
  modified_base 4: mod_base = OTHER; note = 2'-O-methoxyethyl modified nucleotide with phosphorothioate linkage
  modified_base 5: mod_base = OTHER; note = 2'-O-methoxyethyl modified thymine with phosphorothioate linkage
  modified_base 6: mod_base = OTHER; note = 2'-O-methoxyethyl modified nucleotide with phosphorothioate linkage
  modified_base 7: mod_base = OTHER; note = 2'-O-methoxyethyl modified nucleotide with phosphorothioate linkage
  modified_base 8: mod_base = OTHER; note = 2'-O-methoxyethyl modified nucleotide with phosphorothioate linkage
  modified_base 9: mod_base = OTHER; note = 2'-O-methoxyethyl modified nucleotide with phosphorothioate linkage
  modified_base 10: mod_base = OTHER; note = 2'-O-methoxyethyl modified nucleotide with phosphorothioate linkage
  modified_base 11: mod_base = OTHER; note = 2'-O-methoxyethyl modified nucleotide with phosphorothioate linkage
  modified_base 12: mod_base = OTHER; note = 2'-O-methoxyethyl modified nucleotide with phosphorothioate linkage
  modified_base 13: mod_base = OTHER; note = 2'-O-methoxyethyl modified nucleotide with phosphorothioate linkage
  modified_base 14: mod_base = OTHER; note = 2'-O-methoxyethyl modified nucleotide with phosphorothioate linkage
  modified_base 15: mod_base = OTHER; note = 2'-O-methoxyethyl modified nucleotide with phosphorothioate linkage
  modified_base 16: mod_base = OTHER; note = 2'-O-methoxyethyl modified thymine
cacgtgggagagagat

SEQ ID NO: 15 - RNA, 14 nt, synthetic construct
  source 1..14: mol_type = other RNA
  modified_base 1: mod_base = OTHER; note = 2'-O-methoxyethyl modified 5-methylcytosine with phosphorothioate linkage
  modified_base 2: mod_base = OTHER; note = 2'-O-methoxyethyl modified nucleotide with phosphorothioate linkage
  modified_base 3: mod_base = OTHER; note = 2'-O-methoxyethyl modified 5-methylcytosine with phosphorothioate linkage
  modified_base 4: mod_base = OTHER; note = 2'-O-methoxyethyl modified nucleotide with phosphorothioate linkage
  modified_base 5: mod_base = OTHER; note = 2'-O-methoxyethyl modified thymine with phosphorothioate linkage
  modified_base 6: mod_base = OTHER; note = 2'-O-methoxyethyl modified nucleotide with phosphorothioate linkage
  modified_base 7: mod_base = OTHER; note = 2'-O-methoxyethyl modified nucleotide with phosphorothioate linkage
  modified_base 8: mod_base = OTHER; note = 2'-O-methoxyethyl modified nucleotide with phosphorothioate linkage
  modified_base 9: mod_base = OTHER; note = 2'-O-methoxyethyl modified nucleotide with phosphorothioate linkage
  modified_base 10: mod_base = OTHER; note = 2'-O-methoxyethyl modified nucleotide with phosphorothioate linkage
  modified_base 11: mod_base = OTHER; note = 2'-O-methoxyethyl modified nucleotide with phosphorothioate linkage
  modified_base 12: mod_base = OTHER; note = 2'-O-methoxyethyl modified nucleotide with phosphorothioate linkage
  modified_base 13: mod_base = OTHER; note = 2'-O-methoxyethyl modified nucleotide with phosphorothioate linkage
  modified_base 14: mod_base = OTHER; note = 2'-O-methoxyethyl modified nucleotide
cacgtgggagagag

SEQ ID NO: 16 - RNA, 12 nt, synthetic construct
  source 1..12: mol_type = other RNA
  modified_base 1: mod_base = OTHER; note = 2'-O-methoxyethyl modified 5-methylcytosine with phosphorothioate linkage
  modified_base 2: mod_base = OTHER; note = 2'-O-methoxyethyl modified nucleotide with phosphorothioate linkage
  modified_base 3: mod_base = OTHER; note = 2'-O-methoxyethyl modified 5-methylcytosine with phosphorothioate linkage
  modified_base 4: mod_base = OTHER; note = 2'-O-methoxyethyl modified nucleotide with phosphorothioate linkage
  modified_base 5: mod_base = OTHER; note = 2'-O-methoxyethyl modified thymine with phosphorothioate linkage
  modified_base 6: mod_base = OTHER; note = 2'-O-methoxyethyl modified nucleotide with phosphorothioate linkage
  modified_base 7: mod_base = OTHER; note = 2'-O-methoxyethyl modified nucleotide with phosphorothioate linkage
  modified_base 8: mod_base = OTHER; note = 2'-O-methoxyethyl modified nucleotide with phosphorothioate linkage
  modified_base 9: mod_base = OTHER; note = 2'-O-methoxyethyl modified nucleotide with phosphorothioate linkage
  modified_base 10: mod_base = OTHER; note = 2'-O-methoxyethyl modified nucleotide with phosphorothioate linkage
  modified_base 11: mod_base = OTHER; note = 2'-O-methoxyethyl modified nucleotide with phosphorothioate linkage
  modified_base 12: mod_base = OTHER; note = 2'-O-methoxyethyl modified nucleotide
cacgtgggagag

SEQ ID NO: 17 - RNA, 16 nt, synthetic construct
  source 1..16: mol_type = other RNA
  modified_base 1: mod_base = OTHER; note = 2'-fluoro modified nucleotide
  modified_base 2: mod_base = OTHER; note = 2'-O-methoxyethyl modified 5-methylcytosine
  modified_base 3: mod_base = OTHER; note = 2'-O-methoxyethyl modified 5-methylcytosine
  modified_base 4: mod_base = OTHER; note = 2'-O-methoxyethyl modified nucleotide
  modified_base 5: mod_base = OTHER; note = 2'-O-methoxyethyl modified nucleotide
  modified_base 6: mod_base = OTHER; note = 2'-O-methoxyethyl modified nucleotide
  modified_base 7: mod_base = OTHER; note = 2'-O-methoxyethyl modified nucleotide
  modified_base 8: mod_base = OTHER; note = 2'-O-methoxyethyl modified 5-methylcytosine
  modified_base 9: mod_base = OTHER; note = 2'-O-methoxyethyl modified nucleotide
  modified_base 10: mod_base = OTHER; note = 2'-O-methoxyethyl modified nucleotide
  modified_base 11: mod_base = OTHER; note = 2'-O-methoxyethyl modified nucleotide
  modified_base 12: mod_base = OTHER; note = 2'-fluoro modified nucleotide
  modified_base 13: mod_base = OTHER; note = 2'-O-methoxyethyl modified 5-methylcytosine
  modified_base 14: mod_base = OTHER; note = 2'-O-methoxyethyl modified 5-methylcytosine
  modified_base 15: mod_base = OTHER; note = 2'-O-methoxyethyl modified nucleotide
  modified_base 16: mod_base = OTHER; note = 2'-O-methoxyethyl modified nucleotide
gccaaagcggaaccag

SEQ ID NO: 18 - RNA, 18 nt, synthetic construct
  source 1..18: mol_type = other RNA
  modified_base 1: mod_base = OTHER; note = 2'-O-methoxyethyl modified nucleotide with phosphorothioate linkage
  modified_base 2: mod_base = OTHER; note = 2'-O-methoxyethyl modified thymine with phosphorothioate linkage
  modified_base 3: mod_base = OTHER; note = 2'-O-methoxyethyl modified nucleotide with phosphorothioate linkage
  modified_base 4: mod_base = OTHER; note = 2'-O-methoxyethyl modified nucleotide with phosphorothioate linkage
  modified_base 5: mod_base = OTHER; note = 2'-O-methoxyethyl modified thymine with phosphorothioate linkage
  modified_base 6: mod_base = OTHER; note = 2'-O-methoxyethyl modified 5-methylcytosine with phosphorothioate linkage
  modified_base 7: mod_base = OTHER; note = 2'-O-methoxyethyl modified 5-methylcytosine with phosphorothioate linkage
  modified_base 8: mod_base = OTHER; note = 2'-O-methoxyethyl modified nucleotide with phosphorothioate linkage
  modified_base 9: mod_base = OTHER; note = 2'-O-methoxyethyl modified nucleotide with phosphorothioate linkage
  modified_base 10: mod_base = OTHER; note = 2'-O-methoxyethyl modified nucleotide with phosphorothioate linkage
  modified_base 11: mod_base = OTHER; note = 2'-O-methoxyethyl modified nucleotide with phosphorothioate linkage
  modified_base 12: mod_base = OTHER; note = 2'-O-methoxyethyl modified thymine with phosphorothioate linkage
  modified_base 13: mod_base = OTHER; note = 2'-O-methoxyethyl modified 5-methylcytosine with phosphorothioate linkage
  modified_base 14: mod_base = OTHER; note = 2'-O-methoxyethyl modified nucleotide with phosphorothioate linkage
  modified_base 15: mod_base = OTHER; note = 2'-O-methoxyethyl modified 5-methylcytosine with phosphorothioate linkage
  modified_base 16: mod_base = OTHER; note = 2'-O-methoxyethyl modified 5-methylcytosine with phosphorothioate linkage
  modified_base 17: mod_base = OTHER; note = 2'-O-methoxyethyl modified thymine with phosphorothioate linkage
  modified_base 18: mod_base = OTHER; note = 2'-O-methoxyethyl modified 5-methylcytosine
gtggtccggagtcacctc

SEQ ID NO: 19 - RNA, 18 nt, synthetic construct
  source 1..18: mol_type = other RNA
  modified_base 1: mod_base = OTHER; note = 2'-O-methoxyethyl modified nucleotide with phosphorothioate linkage
  modified_base 2: mod_base = OTHER; note = 2'-O-methoxyethyl modified 5-methylcytosine with phosphorothioate linkage
  modified_base 3: mod_base = OTHER; note = 2'-O-methoxyethyl modified 5-methylcytosine with phosphorothioate linkage
  modified_base 4: mod_base = OTHER; note = 2'-O-methoxyethyl modified 5-methylcytosine with phosphorothioate linkage
  modified_base 5: mod_base = OTHER; note = 2'-O-methoxyethyl modified nucleotide with phosphorothioate linkage
  modified_base 6: mod_base = OTHER; note = 2'-O-methoxyethyl modified thymine with phosphorothioate linkage
  modified_base 7: mod_base = OTHER; note = 2'-O-methoxyethyl modified nucleotide with phosphorothioate linkage
  modified_base 8: mod_base = OTHER; note = 2'-O-methoxyethyl modified nucleotide with phosphorothioate linkage
  modified_base 9: mod_base = OTHER; note = 2'-O-methoxyethyl modified 5-methylcytosine with phosphorothioate linkage
  modified_base 10: mod_base = OTHER; note = 2'-O-methoxyethyl modified 5-methylcytosine with phosphorothioate linkage
  modified_base 11: mod_base = OTHER; note = 2'-O-methoxyethyl modified nucleotide with phosphorothioate linkage
  modified_base 12: mod_base = OTHER; note = 2'-O-methoxyethyl modified nucleotide with phosphorothioate linkage
  modified_base 13: mod_base = OTHER; note = 2'-O-methoxyethyl modified nucleotide with phosphorothioate linkage
  modified_base 14: mod_base = OTHER; note = 2'-O-methoxyethyl modified nucleotide with phosphorothioate linkage
  modified_base 15: mod_base = OTHER; note = 2'-O-methoxyethyl modified 5-methylcytosine with phosphorothioate linkage
  modified_base 16: mod_base = OTHER; note = 2'-O-methoxyethyl modified nucleotide with phosphorothioate linkage
  modified_base 17: mod_base = OTHER; note = 2'-O-methoxyethyl modified nucleotide with phosphorothioate linkage
  modified_base 18: mod_base = OTHER; note = 2'-O-methoxyethyl modified nucleotide
gcccgtggccaaagcgga

SEQ ID NO: 20 - RNA, 18 nt, synthetic construct
  source 1..18: mol_type = other RNA
  modified_base 1: mod_base = OTHER; note = 2'-O-methoxyethyl modified 5-methylcytosine with phosphorothioate linkage
  modified_base 2: mod_base = OTHER; note = 2'-O-methoxyethyl modified thymine with phosphorothioate linkage
  modified_base 3: mod_base = OTHER; note = 2'-O-methoxyethyl modified nucleotide with phosphorothioate linkage
  modified_base 4: mod_base = OTHER; note = 2'-O-methoxyethyl modified 5-methylcytosine with phosphorothioate linkage
  modified_base 5: mod_base = OTHER; note = 2'-O-methoxyethyl modified nucleotide with phosphorothioate linkage
  modified_base 6: mod_base = OTHER; note = 2'-O-methoxyethyl modified nucleotide with phosphorothioate linkage
  modified_base 7: mod_base = OTHER; note = 2'-O-methoxyethyl modified thymine with phosphorothioate linkage
  modified_base 8: mod_base = OTHER; note = 2'-O-methoxyethyl modified nucleotide with phosphorothioate linkage
  modified_base 9: mod_base = OTHER; note = 2'-O-methoxyethyl modified nucleotide with phosphorothioate linkage
  modified_base 10: mod_base = OTHER; note = 2'-O-methoxyethyl modified thymine with phosphorothioate linkage
  modified_base 11: mod_base = OTHER; note = 2'-O-methoxyethyl modified 5-methylcytosine with phosphorothioate linkage
  modified_base 12: mod_base = OTHER; note = 2'-O-methoxyethyl modified 5-methylcytosine with phosphorothioate linkage
  modified_base 13: mod_base = OTHER; note = 2'-O-methoxyethyl modified nucleotide with phosphorothioate linkage
  modified_base 14: mod_base = OTHER; note = 2'-O-methoxyethyl modified nucleotide with phosphorothioate linkage
  modified_base 15: mod_base = OTHER; note = 2'-O-methoxyethyl modified nucleotide with phosphorothioate linkage
  modified_base 16: mod_base = OTHER; note = 2'-O-methoxyethyl modified nucleotide with phosphorothioate linkage
  modified_base 17: mod_base = OTHER; note = 2'-O-methoxyethyl modified thymine with phosphorothioate linkage
  modified_base 18: mod_base = OTHER; note = 2'-O-methoxyethyl modified 5-methylcytosine
ctgcagtggtccggagtc

SEQ ID NO: 21 - RNA, 18 nt, synthetic construct
  source 1..18: mol_type = other RNA
  modified_base 1: mod_base = OTHER; note = 2'-O-methoxyethyl modified 5-methylcytosine with phosphorothioate linkage
  modified_base 2: mod_base = OTHER; note = 2'-O-methoxyethyl modified thymine with phosphorothioate linkage
  modified_base 3: mod_base = OTHER; note = 2'-O-methoxyethyl modified thymine with phosphorothioate linkage
  modified_base 4: mod_base = OTHER; note = 2'-O-methoxyethyl modified 5-methylcytosine with phosphorothioate linkage
  modified_base 5: mod_base = OTHER; note = 2'-O-methoxyethyl modified nucleotide with phosphorothioate linkage
  modified_base 6: mod_base = OTHER; note = 2'-O-methoxyethyl modified 5-methylcytosine with phosphorothioate linkage
  modified_base 7: mod_base = OTHER; note = 2'-O-methoxyethyl modified nucleotide with phosphorothioate linkage
  modified_base 8: mod_base = OTHER; note = 2'-O-methoxyethyl modified nucleotide with phosphorothioate linkage
  modified_base 9: mod_base = OTHER; note = 2'-O-methoxyethyl modified 5-methylcytosine with phosphorothioate linkage
  modified_base 10: mod_base = OTHER; note = 2'-O-methoxyethyl modified 5-methylcytosine with phosphorothioate linkage
  modified_base 11: mod_base = OTHER; note = 2'-O-methoxyethyl modified nucleotide with phosphorothioate linkage
  modified_base 12: mod_base = OTHER; note = 2'-O-methoxyethyl modified nucleotide with phosphorothioate linkage
  modified_base 13: mod_base = OTHER; note = 2'-O-methoxyethyl modified 5-methylcytosine with phosphorothioate linkage
  modified_base 14: mod_base = OTHER; note = 2'-O-methoxyethyl modified 5-methylcytosine with phosphorothioate linkage
  modified_base 15: mod_base = OTHER; note = 2'-O-methoxyethyl modified thymine with phosphorothioate linkage
  modified_base 16: mod_base = OTHER; note = 2'-O-methoxyethyl modified nucleotide with phosphorothioate linkage
  modified_base 17: mod_base = OTHER; note = 2'-O-methoxyethyl modified 5-methylcytosine with phosphorothioate linkage
  modified_base 18: mod_base = OTHER; note = 2'-O-methoxyethyl modified nucleotide
cttcacgaccaacctgca

SEQ ID NO: 22 - RNA, 15 nt, synthetic construct
  source 1..15: mol_type = other RNA
  modified_base 1: mod_base = OTHER; note = 2'-O-methoxyethyl modified 5-methylcytosine with phosphorothioate linkage
  modified_base 2: mod_base = OTHER; note = 2'-O-methoxyethyl modified 5-methylcytosine with phosphorothioate linkage
  modified_base 3: mod_base = OTHER; note = 2'-O-methoxyethyl modified nucleotide with phosphorothioate linkage
  modified_base 4: mod_base = OTHER; note = 2'-O-methoxyethyl modified nucleotide with phosphorothioate linkage
  modified_base 5: mod_base = OTHER; note = 2'-O-methoxyethyl modified nucleotide with phosphorothioate linkage
  modified_base 6: mod_base = OTHER; note = 2'-O-methoxyethyl modified nucleotide with phosphorothioate linkage
  modified_base 7: mod_base = OTHER; note = 2'-O-methoxyethyl modified 5-methylcytosine with phosphorothioate linkage
  modified_base 8: mod_base = OTHER; note = 2'-O-methoxyethyl modified nucleotide with phosphorothioate linkage
  modified_base 9: mod_base = OTHER; note = 2'-O-methoxyethyl modified nucleotide with phosphorothioate linkage
  modified_base 10: mod_base = OTHER; note = 2'-O-methoxyethyl modified nucleotide with phosphorothioate linkage
  modified_base 11: mod_base = OTHER; note = 2'-O-methoxyethyl modified nucleotide with phosphorothioate linkage
  modified_base 12: mod_base = OTHER; note = 2'-O-methoxyethyl modified 5-methylcytosine with phosphorothioate linkage
  modified_base 13: mod_base = OTHER; note = 2'-O-methoxyethyl modified 5-methylcytosine with phosphorothioate linkage
  modified_base 14: mod_base = OTHER; note = 2'-O-methoxyethyl modified nucleotide with phosphorothioate linkage
  modified_base 15: mod_base = OTHER; note = 2'-O-methoxyethyl modified nucleotide
ccaaagcggaaccag

SEQ ID NO: 23 - RNA, 13 nt, synthetic construct
  source 1..13: mol_type = other RNA
  modified_base 1: mod_base = OTHER; note = 2'-O-methoxyethyl modified nucleotide with phosphorothioate linkage
  modified_base 2: mod_base = OTHER; note = 2'-O-methoxyethyl modified nucleotide with phosphorothioate linkage
  modified_base 3: mod_base = OTHER; note = 2'-O-methoxyethyl modified nucleotide with phosphorothioate linkage
  modified_base 4: mod_base = OTHER; note = 2'-O-methoxyethyl modified nucleotide with phosphorothioate linkage
  modified_base 5: mod_base = OTHER; note = 2'-O-methoxyethyl modified 5-methylcytosine with phosphorothioate linkage
  modified_base 6: mod_base = OTHER; note = 2'-O-methoxyethyl modified nucleotide with phosphorothioate linkage
  modified_base 7: mod_base = OTHER; note = 2'-O-methoxyethyl modified nucleotide with phosphorothioate linkage
  modified_base 8: mod_base = OTHER; note = 2'-O-methoxyethyl modified nucleotide with phosphorothioate linkage
  modified_base 9: mod_base = OTHER; note = 2'-O-methoxyethyl modified nucleotide with phosphorothioate linkage
  modified_base 10: mod_base = OTHER; note = 2'-O-methoxyethyl modified 5-methylcytosine with phosphorothioate linkage
  modified_base 11: mod_base = OTHER; note = 2'-O-methoxyethyl modified 5-methylcytosine with phosphorothioate linkage
  modified_base 12: mod_base = OTHER; note = 2'-O-methoxyethyl modified nucleotide with phosphorothioate linkage
  modified_base 13: mod_base = OTHER; note = 2'-O-methoxyethyl modified nucleotide
aaagcggaaccag

SEQ ID NO: 24 - RNA, 14 nt, synthetic construct
  source 1..14: mol_type = other RNA
  modified_base 1: mod_base = OTHER; note = 2'-O-methoxyethyl modified 5-methylcytosine with phosphorothioate linkage
  modified_base 2: mod_base = OTHER; note = 2'-O-methoxyethyl modified nucleotide with phosphorothioate linkage
  modified_base 3: mod_base = OTHER; note = 2'-O-methoxyethyl modified nucleotide with phosphorothioate linkage
  modified_base 4: mod_base = OTHER; note = 2'-O-methoxyethyl modified nucleotide with phosphorothioate linkage
  modified_base 5: mod_base = OTHER; note = 2'-O-methoxyethyl modified nucleotide with phosphorothioate linkage
  modified_base 6: mod_base = OTHER; note = 2'-O-methoxyethyl modified 5-methylcytosine with phosphorothioate linkage
  modified_base 7: mod_base = OTHER; note = 2'-O-methoxyethyl modified nucleotide with phosphorothioate linkage
  modified_base 8: mod_base = OTHER; note = 2'-O-methoxyethyl modified nucleotide with phosphorothioate linkage
  modified_base 9: mod_base = OTHER; note = 2'-O-methoxyethyl modified nucleotide with phosphorothioate linkage
  modified_base 10: mod_base = OTHER; note = 2'-O-methoxyethyl modified nucleotide with phosphorothioate linkage
  modified_base 11: mod_base = OTHER; note = 2'-O-methoxyethyl modified 5-methylcytosine with phosphorothioate linkage
  modified_base 12: mod_base = OTHER; note = 2'-O-methoxyethyl modified 5-methylcytosine with phosphorothioate linkage
  modified_base 13: mod_base = OTHER; note = 2'-O-methoxyethyl modified nucleotide with phosphorothioate linkage
  modified_base 14: mod_base = OTHER; note = 2'-O-methoxyethyl modified nucleotide
caaagcggaaccag

SEQ ID NO: 25 - RNA, 16 nt, synthetic construct
  source 1..16: mol_type = other RNA
  modified_base 1: mod_base = OTHER; note = 2'-O-methoxyethyl modified nucleotide with phosphorothioate linkage
  modified_base 2: mod_base = OTHER; note = 2'-O-methoxyethyl modified 5-methylcytosine with phosphorothioate linkage
  modified_base 3: mod_base = OTHER; note = 2'-O-methoxyethyl modified 5-methylcytosine with phosphorothioate linkage
  modified_base 4: mod_base = OTHER; note = 2'-O-methoxyethyl modified nucleotide with phosphorothioate linkage
  modified_base 5: mod_base = OTHER; note = 2'-O-methoxyethyl modified nucleotide with phosphorothioate linkage
  modified_base 6: mod_base = OTHER; note = 2'-O-methoxyethyl modified nucleotide with phosphorothioate linkage
  modified_base 7: mod_base = OTHER; note = 2'-O-methoxyethyl modified nucleotide with phosphorothioate linkage
  modified_base 8: mod_base = OTHER; note = 2'-O-methoxyethyl modified 5-methylcytosine with phosphorothioate linkage
  modified_base 9: mod_base = OTHER; note = 2'-O-methoxyethyl modified nucleotide with phosphorothioate linkage
  modified_base 10: mod_base = OTHER; note = 2'-O-methoxyethyl modified nucleotide with phosphorothioate linkage
  modified_base 11: mod_base = OTHER; note = 2'-O-methoxyethyl modified nucleotide with phosphorothioate linkage
  modified_base 12: mod_base = OTHER; note = 2'-O-methoxyethyl modified nucleotide with phosphorothioate linkage
  modified_base 13: mod_base = OTHER; note = 2'-O-methoxyethyl modified 5-methylcytosine with phosphorothioate linkage
  modified_base 14: mod_base = OTHER; note = 2'-O-methoxyethyl modified 5-methylcytosine with phosphorothioate linkage
  modified_base 15: mod_base = OTHER; note = 2'-O-methoxyethyl modified nucleotide with phosphorothioate linkage
  modified_base 16: mod_base = OTHER; note = 2'-O-methoxyethyl modified nucleotide
gccaaagcggaaccag

SEQ ID NO: 26 - RNA, 16 nt, synthetic construct
  source 1..16: mol_type = other RNA
  modified_base 1: mod_base = OTHER; note = 2'-O-methoxyethyl modified nucleotide with phosphorothioate linkage
  modified_base 2: mod_base = OTHER; note = 2'-O-methoxyethyl modified 5-methylcytosine with phosphorothioate linkage
  modified_base 3: mod_base = OTHER; note = 2'-O-methoxyethyl modified 5-methylcytosine with phosphorothioate linkage
  modified_base 4: mod_base = OTHER; note = 2'-O-methoxyethyl modified nucleotide with phosphorothioate linkage
  modified_base 5: mod_base = OTHER; note = 2'-O-methoxyethyl modified nucleotide with phosphorothioate linkage
  modified_base 6: mod_base = OTHER; note = 2'-O-methoxyethyl modified nucleotide with phosphorothioate linkage
  modified_base 7: mod_base = OTHER; note = 2'-O-methoxyethyl modified nucleotide with phosphorothioate linkage
  modified_base 8: mod_base = OTHER; note = 2'-O-methoxyethyl modified 5-methylcytosine with phosphorothioate linkage
  modified_base 9: mod_base = OTHER; note = 2'-O-methoxyethyl modified nucleotide with phosphorothioate linkage
  modified_base 10: mod_base = OTHER; note = 2'-O-methoxyethyl modified nucleotide with phosphorothioate linkage
  modified_base 11: mod_base = OTHER; note = 2'-O-methoxyethyl modified nucleotide with phosphorothioate linkage
  modified_base 12: mod_base = OTHER; note = 2'-O-methoxyethyl modified nucleotide with phosphorothioate linkage
  modified_base 13: mod_base = OTHER; note = 2'-fluoro modified 5-methylcytosine with phosphorothioate linkage
  modified_base 14: mod_base = OTHER; note = 2'-O-methoxyethyl modified 5-methylcytosine with phosphorothioate linkage
  modified_base 15: mod_base = OTHER; note = 2'-O-methoxyethyl modified nucleotide with phosphorothioate linkage
  modified_base 16: mod_base = OTHER; note = 2'-O-methoxyethyl modified nucleotide
gccaaagcggaaccag

SEQ ID NO: 27 - RNA, 16 nt, synthetic construct
  source 1..16: mol_type = other RNA
  modified_base 1: mod_base = OTHER; note = 2'-fluoro modified nucleotide with phosphorothioate linkage
  modified_base 2: mod_base = OTHER; note = 2'-O-methoxyethyl modified 5-methylcytosine with phosphorothioate linkage
  modified_base 3: mod_base = OTHER; note = 2'-O-methoxyethyl modified 5-methylcytosine with phosphorothioate linkage
  modified_base 4: mod_base = OTHER; note = 2'-O-methoxyethyl modified nucleotide with phosphorothioate linkage
  modified_base 5: mod_base = OTHER; note = 2'-O-methoxyethyl modified nucleotide with phosphorothioate linkage
  modified_base 6: mod_base = OTHER; note = 2'-O-methoxyethyl modified nucleotide with phosphorothioate linkage
  modified_base 7: mod_base = OTHER; note = 2'-O-methoxyethyl modified nucleotide with phosphorothioate linkage
  modified_base 8: mod_base = OTHER; note = 2'-O-methoxyethyl modified 5-methylcytosine with phosphorothioate linkage
  modified_base 9: mod_base = OTHER; note = 2'-O-methoxyethyl modified nucleotide with phosphorothioate linkage
  modified_base 10: mod_base = OTHER; note = 2'-O-methoxyethyl modified nucleotide with phosphorothioate linkage
  modified_base 11: mod_base = OTHER; note = 2'-O-methoxyethyl modified nucleotide with phosphorothioate linkage
  modified_base 12: mod_base = OTHER; note = 2'-O-methoxyethyl modified nucleotide with phosphorothioate linkage
  modified_base 13: mod_base = OTHER; note = 2'-O-methoxyethyl modified 5-methylcytosine with phosphorothioate linkage
  modified_base 14: mod_base = OTHER; note = 2'-O-methoxyethyl modified 5-methylcytosine with phosphorothioate linkage
  modified_base 15: mod_base = OTHER; note = 2'-O-methoxyethyl modified nucleotide with phosphorothioate linkage
  modified_base 16: mod_base = OTHER; note = 2'-O-methoxyethyl modified nucleotide
gccaaagcggaaccag

SEQ ID NO: 28 - RNA, 16 nt, synthetic construct
  source 1..16: mol_type = other RNA
  modified_base 1: mod_base = OTHER; note = 2'-O-methoxyethyl modified nucleotide with phosphorothioate linkage
  modified_base 2: mod_base = OTHER; note = 2'-O-methoxyethyl modified 5-methylcytosine with phosphorothioate linkage
  modified_base 3: mod_base = OTHER; note = 2'-O-methoxyethyl modified 5-methylcytosine with phosphorothioate linkage
  modified_base 4: mod_base = OTHER; note = 2'-O-methoxyethyl modified nucleotide with phosphorothioate linkage
  modified_base 5: mod_base = OTHER; note = 2'-O-methoxyethyl modified nucleotide with phosphorothioate linkage
  modified_base 6: mod_base = OTHER; note = 2'-O-methoxyethyl modified nucleotide with phosphorothioate linkage
  modified_base 7: mod_base = OTHER; note = 2'-O-methoxyethyl modified nucleotide with phosphorothioate linkage
  modified_base 8: mod_base = OTHER; note = 2'-O-methoxyethyl modified 5-methylcytosine with phosphorothioate linkage
  modified_base 9: mod_base = OTHER; note = 2'-O-methoxyethyl modified nucleotide with phosphorothioate linkage
  modified_base 10: mod_base = OTHER; note = 2'-O-methoxyethyl modified nucleotide with phosphorothioate linkage
  modified_base 11: mod_base = OTHER; note = 2'-O-methoxyethyl modified nucleotide with phosphorothioate linkage
  modified_base 12: mod_base = OTHER; note = 2'-fluoro modified nucleotide with phosphorothioate linkage
  modified_base 13: mod_base = OTHER; note = 2'-O-methoxyethyl modified 5-methylcytosine with phosphorothioate linkage
  modified_base 14: mod_base = OTHER; note = 2'-O-methoxyethyl modified 5-methylcytosine with phosphorothioate linkage
  modified_base 15: mod_base = OTHER; note = 2'-O-methoxyethyl modified nucleotide with phosphorothioate linkage
  modified_base 16: mod_base = OTHER; note = 2'-O-methoxyethyl modified nucleotide
gccaaagcggaaccag

SEQ ID NO: 29 - RNA, 16 nt, synthetic construct
  source 1..16: mol_type = other RNA
  modified_base 1: mod_base = OTHER; note = 2'-fluoro modified nucleotide with phosphorothioate linkage
  modified_base 2: mod_base = OTHER; note = 2'-O-methoxyethyl modified 5-methylcytosine with phosphorothioate linkage
  modified_base 3: mod_base = OTHER; note = 2'-O-methoxyethyl modified 5-methylcytosine with phosphorothioate linkage
  modified_base 4: mod_base = OTHER; note = 2'-O-methoxyethyl modified nucleotide with phosphorothioate linkage
  modified_base 5: mod_base = OTHER; note = 2'-O-methoxyethyl modified nucleotide with phosphorothioate linkage
  modified_base 6: mod_base = OTHER; note = 2'-O-methoxyethyl modified nucleotide with phosphorothioate linkage
  modified_base 7: mod_base = OTHER; note = 2'-O-methoxyethyl modified nucleotide with phosphorothioate linkage
  modified_base 8: mod_base = OTHER; note = 2'-O-methoxyethyl modified 5-methylcytosine with phosphorothioate linkage
  modified_base 9: mod_base = OTHER; note = 2'-O-methoxyethyl modified nucleotide with phosphorothioate linkage
  modified_base 10: mod_base = OTHER; note = 2'-O-methoxyethyl modified nucleotide with phosphorothioate linkage
  modified_base 11: mod_base = OTHER; note = 2'-O-methoxyethyl modified nucleotide with phosphorothioate linkage
  modified_base 12: mod_base = OTHER; note = 2'-fluoro modified nucleotide with phosphorothioate linkage
  modified_base 13: mod_base = OTHER; note = 2'-O-methoxyethyl modified 5-methylcytosine with phosphorothioate linkage
  modified_base 14: mod_base = OTHER; note = 2'-O-methoxyethyl modified 5-methylcytosine with phosphorothioate linkage
  modified_base 15: mod_base = OTHER; note = 2'-O-methoxyethyl modified nucleotide with phosphorothioate linkage
  modified_base 16: mod_base = OTHER; note = 2'-O-methoxyethyl modified nucleotide
gccaaagcggaaccag

SEQ ID NO: 30 - RNA, 18 nt, synthetic construct
  source 1..18: mol_type = other RNA
  modified_base 1: mod_base = OTHER; note = 2'-O-methoxyethyl modified nucleotide
  modified_base 2: mod_base = OTHER; note = 2'-O-methoxyethyl modified thymine
  modified_base 3: mod_base = OTHER; note = 2'-O-methoxyethyl modified nucleotide
  modified_base 4: mod_base = OTHER; note = 2'-O-methoxyethyl modified nucleotide
  modified_base 5: mod_base = OTHER; note = 2'-O-methoxyethyl modified nucleotide
  modified_base 6: mod_base = OTHER; note = 2'-O-methoxyethyl modified nucleotide
  modified_base 7: mod_base = OTHER; note = 2'-O-methoxyethyl modified nucleotide
  modified_base 8: mod_base = OTHER; note = 2'-O-methoxyethyl modified nucleotide
  modified_base 9: mod_base = OTHER; note = 2'-O-methoxyethyl modified nucleotide
  modified_base 10: mod_base = OTHER; note = 2'-O-methoxyethyl modified nucleotide
  modified_base 11: mod_base = OTHER; note = 2'-O-methoxyethyl modified nucleotide
  modified_base 12: mod_base = OTHER; note = 2'-O-methoxyethyl modified nucleotide
  modified_base 13: mod_base = OTHER; note = 2'-O-methoxyethyl modified thymine
  modified_base 14: mod_base = OTHER; note = 2'-O-methoxyethyl modified nucleotide
  modified_base 15: mod_base = OTHER; note = 2'-O-methoxyethyl modified nucleotide
  modified_base 16: mod_base = OTHER; note = 2'-O-methoxyethyl modified nucleotide
  modified_base 17: mod_base = OTHER; note = 2'-O-methoxyethyl modified nucleotide
  modified_base 18: mod_base = OTHER; note = 2'-O-methoxyethyl modified nucleotide
atgggagagagatggagg

SEQ ID NO: 31 - RNA, 18 nt, synthetic construct
  source 1..18: mol_type = other RNA
  modified_base 1: mod_base = OTHER; note = 2'-O-methoxyethyl modified 5-methylcytosine
  modified_base 2: mod_base = OTHER; note = 2'-O-methoxyethyl modified nucleotide
  modified_base 3: mod_base = OTHER; note = 2'-O-methoxyethyl modified nucleotide
  modified_base 4: mod_base = OTHER; note = 2'-O-methoxyethyl modified nucleotide
  modified_base 5: mod_base = OTHER; note = 2'-O-methoxyethyl modified nucleotide
  modified_base 6: mod_base = OTHER; note = 2'-O-methoxyethyl modified nucleotide
  modified_base 7: mod_base = OTHER; note = 2'-O-methoxyethyl modified thymine
  modified_base 8: mod_base = OTHER; note = 2'-O-methoxyethyl modified nucleotide
  modified_base 9: mod_base = OTHER; note = 2'-O-methoxyethyl modified nucleotide
  modified_base 10: mod_base = OTHER; note = 2'-O-methoxyethyl modified nucleotide
  modified_base 11: mod_base = OTHER; note = 2'-O-methoxyethyl modified nucleotide
  modified_base 12: mod_base = OTHER; note = 2'-O-methoxyethyl modified nucleotide
  modified_base 13: mod_base = OTHER; note = 2'-O-methoxyethyl modified nucleotide
  modified_base 14: mod_base = OTHER; note = 2'-O-methoxyethyl modified nucleotide
  modified_base 15: mod_base = OTHER; note = 2'-O-methoxyethyl modified nucleotide
  modified_base 16: mod_base = OTHER; note = 2'-O-methoxyethyl modified nucleotide
  modified_base 17: mod_base = OTHER; note = 2'-O-methoxyethyl modified nucleotide
  modified_base 18: mod_base = OTHER; note = 2'-O-methoxyethyl modified thymine
cagagatgggagagagat

SEQ ID NO: 32 - RNA, 18 nt, synthetic construct
  source 1..18: mol_type = other RNA
  modified_base 1: mod_base = OTHER; note = 2'-O-methoxyethyl modified nucleotide
  modified_base 2: mod_base = OTHER; note = 2'-O-methoxyethyl modified nucleotide
  modified_base 3: mod_base = OTHER; note = 2'-O-methoxyethyl modified nucleotide
  modified_base 4: mod_base = OTHER; note = 2'-O-methoxyethyl modified nucleotide
  modified_base 5: mod_base = OTHER; note = 2'-O-methoxyethyl modified nucleotide
  modified_base 6: mod_base = OTHER; note = 2'-O-methoxyethyl modified 5-methylcytosine
  modified_base 7: mod_base = OTHER; note = 2'-O-methoxyethyl modified nucleotide
  modified_base 8: mod_base = OTHER; note = 2'-O-methoxyethyl modified nucleotide
  modified_base 9: mod_base = OTHER; note = 2'-O-methoxyethyl modified nucleotide
  modified_base 10: mod_base = OTHER; note = 2'-O-methoxyethyl modified nucleotide
  modified_base 11: mod_base = OTHER; note = 2'-O-methoxyethyl modified nucleotide
  modified_base 12: mod_base = OTHER; note = 2'-O-methoxyethyl modified thymine
  modified_base 13: mod_base = OTHER; note = 2'-O-methoxyethyl modified nucleotide
  modified_base 14: mod_base = OTHER; note = 2'-O-methoxyethyl modified nucleotide
  modified_base 15: mod_base = OTHER; note = 2'-O-methoxyethyl modified nucleotide
  modified_base 16: mod_base = OTHER; note = 2'-O-methoxyethyl modified nucleotide
  modified_base 17: mod_base = OTHER; note = 2'-O-methoxyethyl modified nucleotide
  modified_base 18: mod_base = OTHER; note = 2'-O-methoxyethyl modified nucleotide
agagacagagatgggaga

SEQ ID NO: 33 - RNA, 18 nt, synthetic construct
  source 1..18: mol_type = other RNA
  modified_base 1: mod_base = OTHER; note = 2'-O-methoxyethyl modified 5-methylcytosine
  modified_base 2: mod_base = OTHER; note = 2'-O-methoxyethyl modified nucleotide
  modified_base 3: mod_base = OTHER; note = 2'-O-methoxyethyl modified nucleotide
  modified_base 4: mod_base = OTHER; note = 2'-O-methoxyethyl modified nucleotide
  modified_base 5: mod_base = OTHER; note = 2'-O-methoxyethyl modified nucleotide
  modified_base 6: mod_base = OTHER; note = 2'-O-methoxyethyl modified nucleotide
  modified_base 7: mod_base = OTHER; note = 2'-O-methoxyethyl modified nucleotide
  modified_base 8: mod_base = OTHER; note = 2'-O-methoxyethyl modified nucleotide
  modified_base 9: mod_base = OTHER; note = 2'-O-methoxyethyl modified nucleotide
  modified_base 10: mod_base = OTHER; note = 2'-O-methoxyethyl modified nucleotide
  modified_base 11: mod_base = OTHER; note = 2'-O-methoxyethyl modified 5-methylcytosine
  modified_base 12: mod_base = OTHER; note = 2'-O-methoxyethyl modified nucleotide
  modified_base 13: mod_base = OTHER; note = 2'-O-methoxyethyl modified nucleotide
  modified_base 14: mod_base = OTHER; note = 2'-O-methoxyethyl modified nucleotide
  modified_base 15: mod_base = OTHER; note = 2'-O-methoxyethyl modified nucleotide
  modified_base 16: mod_base = OTHER; note = 2'-O-methoxyethyl modified nucleotide
  modified_base 17: mod_base = OTHER; note = 2'-O-methoxyethyl modified thymine
  modified_base 18: mod_base = OTHER; note = 2'-O-methoxyethyl modified nucleotide
cagggagagacagagatg

SEQ ID NO: 34 - RNA, 18 nt, synthetic construct
  source 1..18: mol_type = other RNA
  modified_base 1: mod_base = OTHER; note = 2'-O-methoxyethyl modified nucleotide
  modified_base 2: mod_base = OTHER; note = 2'-O-methoxyethyl modified nucleotide
  modified_base 3: mod_base = OTHER; note = 2'-O-methoxyethyl modified 5-methylcytosine
  modified_base 4: mod_base = OTHER; note = 2'-O-methoxyethyl modified nucleotide
  modified_base 5: mod_base = OTHER; note = 2'-O-methoxyethyl modified 5-methylcytosine
  modified_base 6: mod_base = OTHER; note = 2'-O-methoxyethyl modified 5-methylcytosine
  modified_base 7: mod_base = OTHER; note = 2'-O-methoxyethyl modified nucleotide
  modified_base 8: mod_base = OTHER; note = 2'-O-methoxyethyl modified nucleotide
  modified_base 9: mod_base = OTHER; note = 2'-O-methoxyethyl modified nucleotide
  modified_base 10: mod_base = OTHER; note = 2'-O-methoxyethyl modified nucleotide
  modified_base 11: mod_base = OTHER; note = 2'-O-methoxyethyl modified nucleotide
  modified_base 12: mod_base = OTHER; note = 2'-O-methoxyethyl modified nucleotide
  modified_base 13: mod_base = OTHER; note = 2'-O-methoxyethyl modified nucleotide
  modified_base 14: mod_base = OTHER; note = 2'-O-methoxyethyl modified nucleotide
  modified_base 15: mod_base = OTHER; note = 2'-O-methoxyethyl modified nucleotide
  modified_base 16: mod_base = OTHER; note = 2'-O-methoxyethyl modified 5-methylcytosine
  modified_base 17: mod_base = OTHER; note = 2'-O-methoxyethyl modified nucleotide
  modified_base 18: mod_base = OTHER; note = 2'-O-methoxyethyl modified nucleotide
gacaccagggagagacag

SEQ ID NO: 35 - RNA, 18 nt, synthetic construct
  source 1..18: mol_type = other RNA
  modified_base 1: mod_base = OTHER; note = 2'-O-methoxyethyl modified nucleotide
  modified_base 2: mod_base = OTHER; note = 2'-O-methoxyethyl modified nucleotide
  modified_base 3: mod_base = OTHER; note = 2'-O-methoxyethyl modified nucleotide
  modified_base 4: mod_base = OTHER; note = 2'-O-methoxyethyl modified 5-methylcytosine
  modified_base 5: mod_base = OTHER; note = 2'-O-methoxyethyl modified nucleotide
  modified_base 6: mod_base = OTHER; note = 2'-O-methoxyethyl modified nucleotide
  modified_base 7: mod_base = OTHER; note = 2'-O-methoxyethyl modified nucleotide
  modified_base 8: mod_base = OTHER; note = 2'-O-methoxyethyl modified 5-methylcytosine
  modified_base 9: mod_base = OTHER; note = 2'-O-methoxyethyl modified nucleotide
  modified_base 10: mod_base = OTHER; note = 2'-O-methoxyethyl modified 5-methylcytosine
  modified_base 11: mod_base = OTHER; note = 2'-O-methoxyethyl modified 5-methylcytosine
  modified_base 12: mod_base = OTHER; note = 2'-O-methoxyethyl modified nucleotide
  modified_base 13: mod_base = OTHER; note = 2'-O-methoxyethyl modified nucleotide
  modified_base 14: mod_base = OTHER; note = 2'-O-methoxyethyl modified nucleotide
  modified_base 15: mod_base = OTHER; note = 2'-O-methoxyethyl modified nucleotide
  modified_base 16: mod_base = OTHER; note = 2'-O-methoxyethyl modified nucleotide
  modified_base 17: mod_base = OTHER; note = 2'-O-methoxyethyl modified nucleotide
  modified_base 18: mod_base = OTHER; note = 2'-O-methoxyethyl modified nucleotide
aaacagacaccagggaga

SEQ ID NO: 36 - RNA, 18 nt, synthetic construct
  source 1..18: mol_type = other RNA
  modified_base 1: mod_base = OTHER; note = 2'-O-methoxyethyl modified nucleotide
  modified_base 2: mod_base = OTHER; note = 2'-O-methoxyethyl modified nucleotide
  modified_base 3: mod_base = OTHER; note = 2'-O-methoxyethyl modified nucleotide
  modified_base 4: mod_base = OTHER; note = 2'-O-methoxyethyl modified nucleotide
  modified_base 5: mod_base = OTHER; note = 2'-O-methoxyethyl modified nucleotide
  modified_base 6: mod_base = OTHER; note = 2'-O-methoxyethyl modified nucleotide
  modified_base 7: mod_base = OTHER; note = 2'-O-methoxyethyl modified nucleotide
  modified_base 8: mod_base = OTHER; note = 2'-O-methoxyethyl modified nucleotide
  modified_base 9: mod_base = OTHER; note = 2'-O-methoxyethyl modified 5-methylcytosine
  modified_base 10: mod_base = OTHER; note = 2'-O-methoxyethyl modified nucleotide
  modified_base 11: mod_base = OTHER; note = 2'-O-methoxyethyl modified nucleotide
  modified_base 12: mod_base = OTHER; note = 2'-O-methoxyethyl modified nucleotide
  modified_base 13: mod_base = OTHER; note = 2'-O-methoxyethyl modified 5-methylcytosine
  modified_base 14: mod_base = OTHER; note = 2'-O-methoxyethyl modified nucleotide
  modified_base 15: mod_base = OTHER; note = 2'-O-methoxyethyl modified 5-methylcytosine
  modified_base 16: mod_base = OTHER; note = 2'-O-methoxyethyl modified 5-methylcytosine
  modified_base 17: mod_base = OTHER; note = 2'-O-methoxyethyl modified nucleotide
  modified_base 18: mod_base = OTHER; note = 2'-O-methoxyethyl modified nucleotide
aagaaaaacagacaccag

SEQ ID NO: 37 - RNA, 18 nt, synthetic construct
  source 1..18: mol_type = other RNA
  modified_base 1: mod_base = OTHER; note = 2'-O-methoxyethyl modified nucleotide
  modified_base 2: mod_base = OTHER; note = 2'-O-methoxyethyl modified nucleotide
  modified_base 3: mod_base = OTHER; note = 2'-O-methoxyethyl modified nucleotide
  modified_base 4: mod_base = OTHER; note = 2'-O-methoxyethyl modified nucleotide
  modified_base 5: mod_base = OTHER; note = 2'-O-methoxyethyl modified nucleotide
  modified_base 6: mod_base = OTHER; note = 2'-O-methoxyethyl modified nucleotide
  modified_base 7: mod_base = OTHER; note = 2'-O-methoxyethyl modified nucleotide
  modified_base 8: mod_base = OTHER; note = 2'-O-methoxyethyl modified nucleotide
  modified_base 9: mod_base = OTHER; note = 2'-O-methoxyethyl modified nucleotide
  modified_base 10: mod_base = OTHER; note = 2'-O-methoxyethyl modified nucleotide
  modified_base 11: mod_base = OTHER; note = 2'-O-methoxyethyl modified nucleotide
  modified_base 12: mod_base = OTHER; note = 2'-O-methoxyethyl modified nucleotide
  modified_base 13: mod_base = OTHER; note = 2'-O-methoxyethyl modified nucleotide
  modified_base 14: mod_base = OTHER; note = 2'-O-methoxyethyl modified 5-methylcytosine
  modified_base 15: mod_base = OTHER; note = 2'-O-methoxyethyl modified nucleotide
  modified_base 16: mod_base = OTHER; note = 2'-O-methoxyethyl modified nucleotide
  modified_base 17: mod_base = OTHER; note = 2'-O-methoxyethyl modified nucleotide
  modified_base 18: mod_base = OTHER; note = 2'-O-methoxyethyl modified 5-methylcytosine
aggagaagaaaaacagac

SEQ ID NO: 38 - RNA, 18 nt, synthetic construct
  source 1..18: mol_type = other RNA
  modified_base 1: mod_base = OTHER; note = 2'-O-methoxyethyl modified nucleotide
  modified_base 2: mod_base = OTHER; note = 2'-O-methoxyethyl modified nucleotide
  modified_base 3: mod_base = OTHER; note = 2'-O-methoxyethyl modified nucleotide
  modified_base 4: mod_base = OTHER; note = 2'-O-methoxyethyl modified nucleotide
  modified_base 5: mod_base = OTHER; note = 2'-O-methoxyethyl modified nucleotide
  modified_base 6: mod_base = OTHER; note = 2'-O-methoxyethyl modified nucleotide
  modified_base 7: mod_base = OTHER; note = 2'-O-methoxyethyl modified nucleotide
  modified_base 8: mod_base = OTHER; note = 2'-O-methoxyethyl modified nucleotide
  modified_base 9: mod_base = OTHER; note = 2'-O-methoxyethyl modified nucleotide
  modified_base 10: mod_base = OTHER; note = 2'-O-methoxyethyl modified nucleotide
  modified_base 11: mod_base = OTHER; note = 2'-O-methoxyethyl modified nucleotide
  modified_base 12: mod_base = OTHER; note = 2'-O-methoxyethyl modified nucleotide
  modified_base 13: mod_base = OTHER; note = 2'-O-methoxyethyl modified nucleotide
  modified_base 14: mod_base = OTHER; note = 2'-O-methoxyethyl modified nucleotide
  modified_base 15: mod_base = OTHER; note = 2'-O-methoxyethyl modified nucleotide
  modified_base 16: mod_base = OTHER; note = 2'-O-methoxyethyl modified nucleotide
  modified_base 17: mod_base = OTHER; note = 2'-O-methoxyethyl modified nucleotide
  modified_base 18: mod_base = OTHER; note = 2'-O-methoxyethyl modified nucleotide
agaggaggagaagaaaaa

SEQ ID NO: 39 - RNA, 18 nt, synthetic construct
  source 1..18: mol_type = other RNA
  modified_base 1: mod_base = OTHER; note = 2'-O-methoxyethyl modified 5-methylcytosine
  modified_base 2: mod_base = OTHER; note = 2'-O-methoxyethyl modified nucleotide
  modified_base 3: mod_base = OTHER; note = 2'-O-methoxyethyl modified nucleotide
  modified_base 4: mod_base = OTHER; note = 2'-O-methoxyethyl modified nucleotide
  modified_base 5: mod_base = OTHER; note = 2'-O-methoxyethyl modified nucleotide
  modified_base 6: mod_base = OTHER; note = 2'-O-methoxyethyl modified nucleotide
  modified_base 7: mod_base = OTHER; note = 2'-O-methoxyethyl modified nucleotide
  modified_base 8: mod_base = OTHER; note = 2'-O-methoxyethyl modified nucleotide
  modified_base 9: mod_base = OTHER; note = 2'-O-methoxyethyl modified nucleotide
  modified_base 10: mod_base = OTHER; note = 2'-O-methoxyethyl modified nucleotide
  modified_base 11: mod_base = OTHER; note = 2'-O-methoxyethyl modified nucleotide
  modified_base 12: mod_base = OTHER; note = 2'-O-methoxyethyl modified nucleotide
  modified_base 13: mod_base = OTHER; note = 2'-O-methoxyethyl modified nucleotide
  modified_base 14: mod_base = OTHER; note = 2'-O-methoxyethyl modified nucleotide
  modified_base 15: mod_base = OTHER; note = 2'-O-methoxyethyl modified nucleotide
  modified_base 16: mod_base = OTHER; note = 2'-O-methoxyethyl modified nucleotide
  modified_base 17: mod_base = OTHER; note = 2'-O-methoxyethyl modified nucleotide
  modified_base 18: mod_base = OTHER; note = 2'-O-methoxyethyl modified nucleotide
caaggagaggaggagaag

SEQ ID NO: 40 - RNA, 18 nt, synthetic construct
  source 1..18: mol_type = other RNA
  modified_base 1: mod_base = OTHER; note = 2'-O-methoxyethyl modified nucleotide
  modified_base 2: mod_base = OTHER; note = 2'-O-methoxyethyl modified nucleotide
  modified_base 3: mod_base = OTHER; note = 2'-O-methoxyethyl modified nucleotide
  modified_base 4: mod_base = OTHER; note = 2'-O-methoxyethyl modified nucleotide
  modified_base 5: mod_base = OTHER; note = 2'-O-methoxyethyl modified nucleotide
  modified_base 6: mod_base = OTHER; note = 2'-O-methoxyethyl modified 5-methylcytosine
  modified_base 7: mod_base = OTHER; note = 2'-O-methoxyethyl modified nucleotide
  modified_base 8: mod_base = OTHER; note = 2'-O-methoxyethyl modified nucleotide
  modified_base 9: mod_base = OTHER; note = 2'-O-methoxyethyl modified nucleotide
  modified_base 10: mod_base = OTHER; note = 2'-O-methoxyethyl modified nucleotide
  modified_base 11: mod_base = OTHER; note = 2'-O-methoxyethyl modified nucleotide
  modified_base 12: mod_base = OTHER; note = 2'-O-methoxyethyl modified nucleotide
  modified_base 13: mod_base = OTHER; note = 2'-O-methoxyethyl modified nucleotide
  modified_base 14: mod_base = OTHER; note = 2'-O-methoxyethyl modified nucleotide
  modified_base 15: mod_base = OTHER; note = 2'-O-methoxyethyl modified nucleotide
  modified_base 16: mod_base = OTHER; note = 2'-O-methoxyethyl modified nucleotide
  modified_base 17: mod_base = OTHER; note = 2'-O-methoxyethyl modified nucleotide
  modified_base 18: mod_base = OTHER; note = 2'-O-methoxyethyl modified nucleotide
agagacaaggagaggagg

SEQ ID NO: 41 - RNA, 18 nt, synthetic construct
  source 1..18: mol_type = other RNA
  modified_base 1: mod_base = OTHER; note = 2'-O-methoxyethyl modified nucleotide
  modified_base 2: mod_base = OTHER; note = 2'-O-methoxyethyl modified nucleotide
  modified_base 3: mod_base = OTHER; note = 2'-O-methoxyethyl modified nucleotide
  modified_base 4: mod_base = OTHER; note = 2'-O-methoxyethyl modified nucleotide
  modified_base 5: mod_base = OTHER; note = 2'-O-methoxyethyl modified nucleotide
  modified_base 6: mod_base = OTHER; note = 2'-O-methoxyethyl modified nucleotide
  modified_base 7: mod_base = OTHER; note = 2'-O-methoxyethyl modified nucleotide
  modified_base 8: mod_base = OTHER; note = 2'-O-methoxyethyl modified nucleotide
  modified_base 9: mod_base = OTHER; note = 2'-O-methoxyethyl modified nucleotide
  modified_base 10: mod_base = OTHER; note = 2'-O-methoxyethyl modified nucleotide
  modified_base 11: mod_base = OTHER; note = 2'-O-methoxyethyl modified 5-methylcytosine
  modified_base 12: mod_base = OTHER; note = 2'-O-methoxyethyl modified nucleotide
  modified_base 13: mod_base = OTHER; note = 2'-O-methoxyethyl modified nucleotide
  modified_base 14: mod_base = OTHER; note = 2'-O-methoxyethyl modified nucleotide
  modified_base 15: mod_base = OTHER; note = 2'-O-methoxyethyl modified nucleotide
  modified_base 16: mod_base = OTHER; note = 2'-O-methoxyethyl modified nucleotide
  modified_base 17: mod_base = OTHER; note = 2'-O-methoxyethyl modified nucleotide
  modified_base 18: mod_base = OTHER; note = 2'-O-methoxyethyl modified nucleotide
gggagagagacaaggaga

SEQ ID NO: 42 - RNA, 18 nt, synthetic construct
  source 1..18: mol_type = other RNA
  modified_base 1: mod_base = OTHER; note = 2'-O-methoxyethyl modified nucleotide
  modified_base 2: mod_base = OTHER; note = 2'-O-methoxyethyl modified nucleotide
  modified_base 3: mod_base = OTHER; note = 2'-O-methoxyethyl modified thymine
  modified_base 4: mod_base = OTHER; note = 2'-O-methoxyethyl modified nucleotide
  modified_base 5: mod_base = OTHER; note = 2'-O-methoxyethyl modified thymine
  modified_base 6: mod_base = OTHER; note = 2'-O-methoxyethyl modified nucleotide
  modified_base 7: mod_base = OTHER; note = 2'-O-methoxyethyl modified nucleotide
  modified_base 8: mod_base = OTHER; note = 2'-O-methoxyethyl modified nucleotide
  modified_base 9: mod_base = OTHER; note = 2'-O-methoxyethyl modified nucleotide
  modified_base 10: mod_base = OTHER; note = 2'-O-methoxyethyl modified nucleotide
  modified_base 11: mod_base = OTHER; note = 2'-O-methoxyethyl modified nucleotide
  modified_base 12: mod_base = OTHER; note = 2'-O-methoxyethyl modified nucleotide
  modified_base 13: mod_base = OTHER; note = 2'-O-methoxyethyl modified nucleotide
  modified_base 14: mod_base = OTHER; note = 2'-O-methoxyethyl modified nucleotide
  modified_base 15: mod_base = OTHER; note = 2'-O-methoxyethyl modified nucleotide
  modified_base 16: mod_base = OTHER; note = 2'-O-methoxyethyl modified 5-methylcytosine
  modified_base 17: mod_base = OTHER; note = 2'-O-methoxyethyl modified nucleotide
  modified_base 18: mod_base = OTHER; note = 2'-O-methoxyethyl modified nucleotide
ggtgtgggagagagacaa

SEQ ID NO: 43 - RNA, 18 nt, synthetic construct
  source 1..18: mol_type = other RNA
  modified_base 1: mod_base = OTHER; note = 2'-O-methoxyethyl modified nucleotide
  modified_base 2: mod_base = OTHER; note = 2'-O-methoxyethyl modified nucleotide
  modified_base 3: mod_base = OTHER; note = 2'-O-methoxyethyl modified nucleotide
  modified_base 4: mod_base = OTHER; note = 2'-O-methoxyethyl modified nucleotide
  modified_base 5: mod_base = OTHER; note = 2'-O-methoxyethyl modified nucleotide
  modified_base 6: mod_base = OTHER; note = 2'-O-methoxyethyl modified nucleotide
  modified_base 7: mod_base = OTHER; note = 2'-O-methoxyethyl modified thymine
  modified_base 8: mod_base = OTHER; note = 2'-O-methoxyethyl modified thymine
  modified_base 9: mod_base = OTHER; note = 2'-O-methoxyethyl modified nucleotide
  modified_base 10: mod_base = OTHER; note = 2'-O-methoxyethyl modified thymine
  modified_base 11: mod_base = OTHER; note = 2'-O-methoxyethyl modified nucleotide
  modified_base 12: mod_base = OTHER; note = 2'-O-methoxyethyl modified nucleotide
  modified_base 13: mod_base = OTHER; note = 2'-O-methoxyethyl modified nucleotide
  modified_base 14: mod_base = OTHER; note = 2'-O-methoxyethyl modified nucleotide
  modified_base 15: mod_base = OTHER; note = 2'-O-methoxyethyl modified nucleotide
  modified_base 16: mod_base = OTHER; note = 2'-O-methoxyethyl modified nucleotide
  modified_base 17: mod_base = OTHER; note = 2'-O-methoxyethyl modified nucleotide
  modified_base 18: mod_base = OTHER; note = 2'-O-methoxyethyl modified nucleotide
ggagggttgtgggagaga

SEQ ID NO: 44 - RNA, 18 nt, synthetic construct
  source 1..18: mol_type = other RNA
  modified_base 1: mod_base = OTHER; note = 2'-O-methoxyethyl modified nucleotide
  modified_base 2: mod_base = OTHER; note = 2'-O-methoxyethyl modified nucleotide
  modified_base 3: mod_base = OTHER; note = 2'-O-methoxyethyl modified nucleotide
  modified_base 4: mod_base = OTHER; note = 2'-O-methoxyethyl modified nucleotide
  modified_base 5: mod_base = OTHER; note = 2'-O-methoxyethyl modified thymine
  modified_base 6: mod_base = OTHER; note = 2'-O-methoxyethyl modified nucleotide
  modified_base 7: mod_base = OTHER; note = 2'-O-methoxyethyl modified nucleotide
  modified_base 8: mod_base = OTHER; note = 2'-O-methoxyethyl modified nucleotide
  modified_base 9: mod_base = OTHER; note = 2'-O-methoxyethyl modified thymine
  modified_base 10: mod_base = OTHER; note = 2'-O-methoxyethyl modified nucleotide
  modified_base 11: mod_base = OTHER; note = 2'-O-methoxyethyl modified nucleotide
  modified_base 12: mod_base = OTHER; note = 2'-O-methoxyethyl modified nucleotide
  modified_base 13: mod_base = OTHER; note = 2'-O-methoxyethyl modified thymine
  modified_base 14: mod_base = OTHER; note = 2'-O-methoxyethyl modified nucleotide
  modified_base 15: mod_base = OTHER; note = 2'-O-methoxyethyl modified thymine
  modified_base 16: mod_base = OTHER; note = 2'-O-methoxyethyl modified nucleotide
  modified_base 17: mod_base = OTHER; note = 2'-O-methoxyethyl modified nucleotide
  modified_base 18: mod_base = OTHER; note = 2'-O-methoxyethyl modified nucleotide
gagatggatgggtgtggg

SEQ ID NO: 45 - RNA, 18 nt, synthetic construct
  source 1..18: mol_type = other RNA
  modified_base 1: mod_base = OTHER; note = 2'-O-methoxyethyl modified nucleotide
  modified_base 2: mod_base = OTHER; note = 2'-O-methoxyethyl modified nucleotide
  modified_base 3: mod_base = OTHER; note = 2'-O-methoxyethyl modified nucleotide
  modified_base 4: mod_base = OTHER; note = 2'-O-methoxyethyl modified nucleotide
  modified_base 5: mod_base = OTHER; note = 2'-O-methoxyethyl modified nucleotide
  modified_base 6: mod_base = OTHER; note = 2'-O-methoxyethyl modified nucleotide
  modified_base 7: mod_base = OTHER; note = 2'-O-methoxyethyl modified nucleotide
  modified_base 8: mod_base = OTHER; note = 2'-O-methoxyethyl modified nucleotide
  modified_base 9: mod_base = OTHER; note = 2'-O-methoxyethyl modified nucleotide
  modified_base 10: mod_base = OTHER; note = 2'-O-methoxyethyl modified thymine
  modified_base 11: mod_base = OTHER; note = 2'-O-methoxyethyl modified nucleotide
  modified_base 12: mod_base = OTHER; note = 2'-O-methoxyethyl modified nucleotide
  modified_base 13: mod_base = OTHER; note = 2'-O-methoxyethyl modified nucleotide
  modified_base 14: mod_base = OTHER; note = 2'-O-methoxyethyl modified thymine
  modified_base 15: mod_base = OTHER; note = 2'-O-methoxyethyl modified nucleotide
  modified_base 16: mod_base = OTHER; note = 2'-O-methoxyethyl modified nucleotide
  modified_base 17: mod_base = OTHER; note = 2'-O-methoxyethyl modified nucleotide
  modified_base 18: mod_base = OTHER; note = 2'-O-methoxyethyl modified thymine
ggagagagatggatgggt

SEQ ID NO: 46 - RNA, 18 nt, synthetic construct
  source 1..18: mol_type = other RNA
  modified_base 1: mod_base = OTHER; note = 2'-O-methoxyethyl modified nucleotide
  modified_base 2: mod_base = OTHER; note = 2'-O-methoxyethyl modified 5-methylcytosine
  modified_base 3: mod_base = OTHER; note = 2'-O-methoxyethyl modified nucleotide
  modified_base 4: mod_base = OTHER; note = 2'-O-methoxyethyl modified thymine
  modified_base 5: mod_base = OTHER; note = 2'-O-methoxyethyl modified nucleotide
  modified_base 6: mod_base = OTHER; note = 2'-O-methoxyethyl modified nucleotide
  modified_base 7: mod_base = OTHER; note = 2'-O-methoxyethyl modified nucleotide
  modified_base 8: mod_base = OTHER; note = 2'-O-methoxyethyl modified nucleotide
  modified_base 9: mod_base = OTHER; note = 2'-O-methoxyethyl modified nucleotide
  modified_base 10: mod_base = OTHER; note = 2'-O-methoxyethyl modified nucleotide
  modified_base 11: mod_base = OTHER; note = 2'-O-methoxyethyl modified nucleotide
  modified_base 12: mod_base = OTHER; note = 2'-O-methoxyethyl modified nucleotide
  modified_base 13: mod_base = OTHER; note = 2'-O-methoxyethyl modified nucleotide
  modified_base 14: mod_base = OTHER; note = 2'-O-methoxyethyl modified nucleotide
  modified_base 15: mod_base = OTHER; note = 2'-O-methoxyethyl modified thymine
  modified_base 16: mod_base = OTHER; note = 2'-O-methoxyethyl modified nucleotide
  modified_base 17: mod_base = OTHER; note = 2'-O-methoxyethyl modified nucleotide
  modified_base 18: mod_base = OTHER; note = 2'-O-methoxyethyl modified nucleotide
acgtgggagagagatgga

SEQ ID NO: 47 - RNA, 18 nt, synthetic construct
  source 1..18: mol_type = other RNA
  modified_base 1: mod_base = OTHER; note = 2'-O-methoxyethyl modified nucleotide
  modified_base 2: mod_base = OTHER; note = 2'-O-methoxyethyl modified nucleotide
  modified_base 3: mod_base = OTHER; note = 2'-O-methoxyethyl modified nucleotide
  modified_base 4: mod_base = OTHER; note = 2'-O-methoxyethyl modified nucleotide
  modified_base 5: mod_base = OTHER; note = 2'-O-methoxyethyl modified 5-methylcytosine
  modified_base 6: mod_base = OTHER; note = 2'-O-methoxyethyl modified nucleotide
  modified_base 7: mod_base = OTHER; note = 2'-O-methoxyethyl modified 5-methylcytosine
  modified_base 8: mod_base = OTHER; note = 2'-O-methoxyethyl modified nucleotide
  modified_base 9: mod_base = OTHER; note = 2'-O-methoxyethyl modified thymine
  modified_base 10: mod_base = OTHER; note = 2'-O-methoxyethyl modified nucleotide
  modified_base 11: mod_base = OTHER; note = 2'-O-methoxyethyl modified nucleotide
  modified_base 12: mod_base = OTHER; note = 2'-O-methoxyethyl modified nucleotide
  modified_base 13: mod_base = OTHER; note = 2'-O-methoxyethyl modified nucleotide
  modified_base 14: mod_base = OTHER; note = 2'-O-methoxyethyl modified nucleotide
  modified_base 15: mod_base = OTHER; note = 2'-O-methoxyethyl modified nucleotide
  modified_base 16: mod_base = OTHER; note = 2'-O-methoxyethyl modified nucleotide
  modified_base 17: mod_base = OTHER; note = 2'-O-methoxyethyl modified nucleotide
  modified_base 18: mod_base = OTHER; note = 2'-O-methoxyethyl modified nucleotide
gagacacgtgggagagag

SEQ ID NO: 48 - RNA, 18 nt, synthetic construct
  source 1..18: mol_type = other RNA
  modified_base 1: mod_base = OTHER; note = 2'-O-methoxyethyl modified nucleotide
  modified_base 2: mod_base = OTHER; note = 2'-O-methoxyethyl modified nucleotide
  modified_base 3: mod_base = OTHER; note = 2'-O-methoxyethyl modified nucleotide
  modified_base 4: mod_base = OTHER; note = 2'-O-methoxyethyl modified nucleotide
  modified_base 5: mod_base = OTHER; note = 2'-O-methoxyethyl modified nucleotide
  modified_base 6: mod_base = OTHER; note = 2'-O-methoxyethyl modified nucleotide
  modified_base 7: mod_base = OTHER; note = 2'-O-methoxyethyl modified nucleotide
  modified_base 8: mod_base = OTHER; note = 2'-O-methoxyethyl modified nucleotide
  modified_base 9: mod_base = OTHER; note = 2'-O-methoxyethyl modified nucleotide
  modified_base 10: mod_base = OTHER; note = 2'-O-methoxyethyl modified 5-methylcytosine
  modified_base 11: mod_base = OTHER; note = 2'-O-methoxyethyl modified nucleotide
  modified_base 12: mod_base = OTHER; note = 2'-O-methoxyethyl modified 5-methylcytosine
  modified_base 13: mod_base = OTHER; note = 2'-O-methoxyethyl modified nucleotide
  modified_base 14: mod_base = OTHER; note = 2'-O-methoxyethyl modified thymine
  modified_base 15: mod_base = OTHER; note = 2'-O-methoxyethyl modified nucleotide
  modified_base 16: mod_base = OTHER; note = 2'-O-methoxyethyl modified nucleotide
  modified_base 17: mod_base = OTHER; note = 2'-O-methoxyethyl modified nucleotide
  modified_base 18: mod_base = OTHER; note = 2'-O-methoxyethyl modified nucleotide
agggagagacacgtggga

SEQ ID NO: 49 - RNA, 18 nt, synthetic construct
  source 1..18: mol_type = other RNA
  modified_base 1: mod_base = OTHER; note = 2'-O-methoxyethyl modified nucleotide
  modified_base 2: mod_base = OTHER; note = 2'-O-methoxyethyl modified nucleotide
  modified_base 3: mod_base = OTHER; note = 2'-O-methoxyethyl modified thymine
  modified_base 4: mod_base = OTHER; note = 2'-O-methoxyethyl modified nucleotide
  modified_base 5: mod_base = OTHER; note = 2'-O-methoxyethyl modified nucleotide
  modified_base 6: mod_base = OTHER; note = 2'-O-methoxyethyl modified nucleotide
  modified_base 7: mod_base = OTHER; note = 2'-O-methoxyethyl modified nucleotide
  modified_base 8: mod_base = OTHER; note = 2'-O-methoxyethyl modified nucleotide
  modified_base 9: mod_base = OTHER; note = 2'-O-methoxyethyl modified nucleotide
  modified_base 10: mod_base = OTHER; note = 2'-O-methoxyethyl modified nucleotide
  modified_base 11: mod_base = OTHER; note = 2'-O-methoxyethyl modified nucleotide
  modified_base 12: mod_base = OTHER; note = 2'-O-methoxyethyl modified nucleotide
  modified_base 13: mod_base = OTHER; note = 2'-O-methoxyethyl modified nucleotide
  modified_base 14: mod_base = OTHER; note = 2'-O-methoxyethyl modified nucleotide
  modified_base 15: mod_base = OTHER; note = 2'-O-methoxyethyl modified 5-methylcytosine
  modified_base 16: mod_base = OTHER; note = 2'-O-methoxyethyl modified nucleotide
  modified_base 17: mod_base = OTHER; note = 2'-O-methoxyethyl modified 5-methylcytosine
  modified_base 18: mod_base = OTHER; note = 2'-O-methoxyethyl modified nucleotide
ggtgagggaagagacacg

SEQ ID NO: 50 - RNA, 18 nt, synthetic construct
  source 1..18: mol_type = other RNA
  modified_base 1: mod_base = OTHER; note = 2'-O-methoxyethyl modified nucleotide
  modified_base 2: mod_base = OTHER; note = 2'-O-methoxyethyl modified nucleotide
  modified_base 3: mod_base = OTHER; note = 2'-O-methoxyethyl modified nucleotide
  modified_base 4: mod_base = OTHER; note = 2'-O-methoxyethyl modified nucleotide
  modified_base 5: mod_base = OTHER; note = 2'-O-methoxyethyl modified nucleotide
  modified_base 6: mod_base = OTHER; note = 2'-O-methoxyethyl modified nucleotide
  modified_base 7: mod_base = OTHER; note = 2'-O-methoxyethyl modified nucleotide
  modified_base 8: mod_base = OTHER; note = 2'-O-methoxyethyl modified thymine
  modified_base 9: mod_base = OTHER; note = 2'-O-methoxyethyl modified nucleotide
  modified_base 10: mod_base = OTHER; note = 2'-O-methoxyethyl modified nucleotide
  modified_base 11: mod_base = OTHER; note = 2'-O-methoxyethyl modified nucleotide
  modified_base 12: mod_base = OTHER; note = 2'-O-methoxyethyl modified nucleotide
  modified_base 13: mod_base = OTHER; note = 2'-O-methoxyethyl modified nucleotide
  modified_base 14: mod_base = OTHER; note = 2'-O-methoxyethyl modified nucleotide
  modified_base 15: mod_base = OTHER; note = 2'-O-methoxyethyl modified nucleotide
  modified_base 16: mod_base = OTHER; note = 2'-O-methoxyethyl modified nucleotide
  modified_base 17: mod_base = OTHER; note = 2'-O-methoxyethyl modified nucleotide
  modified_base 18: mod_base = OTHER; note = 2'-O-methoxyethyl modified nucleotide
gagaaggtgaagggagag

SEQ ID NO: 51 - RNA, 18 nt, synthetic construct
  source 1..18: mol_type = other RNA
  modified_base 1: mod_base = OTHER; note = 2'-O-methoxyethyl modified nucleotide
  modified_base 2: mod_base = OTHER; note = 2'-O-methoxyethyl modified nucleotide
  modified_base 3: mod_base = OTHER; note = 2'-O-methoxyethyl modified nucleotide
  modified_base 4: mod_base = OTHER; note = 2'-O-methoxyethyl modified nucleotide
  modified_base 5: mod_base = OTHER; note = 2'-O-methoxyethyl modified nucleotide
  modified_base 6: mod_base = OTHER; note = 2'-O-methoxyethyl modified nucleotide
  modified_base 7: mod_base = OTHER; note = 2'-O-methoxyethyl modified nucleotide
  modified_base 8: mod_base = OTHER; note = 2'-O-methoxyethyl modified nucleotide
  modified_base 9: mod_base = OTHER; note = 2'-O-methoxyethyl modified nucleotide
  modified_base 10: mod_base = OTHER; note = 2'-O-methoxyethyl modified nucleotide
  modified_base 11: mod_base = OTHER; note = 2'-O-methoxyethyl modified nucleotide
  modified_base 12: mod_base = OTHER; note = 2'-O-methoxyethyl modified nucleotide
  modified_base 13: mod_base = OTHER; note = 2'-O-methoxyethyl modified thymine
  modified_base 14: mod_base = OTHER; note = 2'-O-methoxyethyl modified nucleotide
  modified_base 15: mod_base = OTHER; note = 2'-O-methoxyethyl modified nucleotide
  modified_base 16: mod_base = OTHER; note = 2'-O-methoxyethyl modified nucleotide
  modified_base 17: mod_base = OTHER; note = 2'-O-methoxyethyl modified nucleotide
  modified_base 18: mod_base = OTHER; note = 2'-O-methoxyethyl modified nucleotide
agggagagaaggtgaggg

SEQ ID NO: 52 - RNA, 18 nt, synthetic construct
  source 1..18: mol_type = other RNA
  modified_base 1: mod_base = OTHER; note = 2'-O-methoxyethyl modified thymine
  modified_base 2: mod_base = OTHER; note = 2'-O-methoxyethyl modified nucleotide
  modified_base 3: mod_base = OTHER; note = 2'-O-methoxyethyl modified nucleotide
  modified_base 4: mod_base = OTHER; note = 2'-O-methoxyethyl modified nucleotide
  modified_base 5: mod_base = OTHER; note = 2'-O-methoxyethyl modified nucleotide
  modified_base 6: mod_base = OTHER; note = 2'-O-methoxyethyl modified nucleotide
  modified_base 7: mod_base = OTHER; note = 2'-O-methoxyethyl modified nucleotide
  modified_base 8: mod_base = OTHER; note = 2'-O-methoxyethyl modified nucleotide
  modified_base 9: mod_base = OTHER; note = 2'-O-methoxyethyl modified nucleotide
  modified_base 10: mod_base = OTHER; note = 2'-O-methoxyethyl modified nucleotide
  modified_base 11: mod_base = OTHER; note = 2'-O-methoxyethyl modified nucleotide
  modified_base 12: mod_base = OTHER; note = 2'-O-methoxyethyl modified nucleotide
  modified_base 13: mod_base = OTHER; note = 2'-O-methoxyethyl modified nucleotide
  modified_base 14: mod_base = OTHER; note = 2'-O-methoxyethyl modified nucleotide
  modified_base 15: mod_base = OTHER; note = 2'-O-methoxyethyl modified nucleotide
  modified_base 16: mod_base = OTHER; note = 2'-O-methoxyethyl modified nucleotide
  modified_base 17: mod_base = OTHER; note = 2'-O-methoxyethyl modified nucleotide
  modified_base 18: mod_base = OTHER; note = 2'-O-methoxyethyl modified thymine
tggagggagagagaaggt

SEQ ID NO: 53 - RNA, 18 nt, synthetic construct
  source 1..18: mol_type = other RNA
  modified_base 1: mod_base = OTHER; note = 2'-O-methoxyethyl modified nucleotide
  modified_base 2: mod_base = OTHER; note = 2'-O-methoxyethyl modified nucleotide
  modified_base 3: mod_base = OTHER; note = 2'-O-methoxyethyl modified nucleotide
  modified_base 4: mod_base = OTHER; note = 2'-O-methoxyethyl modified nucleotide
  modified_base 5: mod_base = OTHER; note = 2'-O-methoxyethyl modified nucleotide
  modified_base 6: mod_base = OTHER; note = 2'-O-methoxyethyl modified thymine
  modified_base 7: mod_base = OTHER; note = 2'-O-methoxyethyl modified nucleotide
  modified_base 8: mod_base = OTHER; note = 2'-O-methoxyethyl modified nucleotide
  modified_base 9: mod_base = OTHER; note = 2'-O-methoxyethyl modified nucleotide
  modified_base 10: mod_base = OTHER; note = 2'-O-methoxyethyl modified nucleotide
  modified_base 11: mod_base = OTHER; note = 2'-O-methoxyethyl modified nucleotide
  modified_base 12: mod_base = OTHER; note = 2'-O-methoxyethyl modified nucleotide
  modified_base 13: mod_base = OTHER; note = 2'-O-methoxyethyl modified nucleotide
  modified_base 14: mod_base = OTHER; note = 2'-O-methoxyethyl modified nucleotide
  modified_base 15: mod_base = OTHER; note = 2'-O-methoxyethyl modified nucleotide
  modified_base 16: mod_base = OTHER; note = 2'-O-methoxyethyl modified nucleotide
  modified_base 17: mod_base = OTHER; note = 2'-O-methoxyethyl modified nucleotide
  modified_base 18: mod_base = OTHER; note = 2'-O-methoxyethyl modified nucleotide
agaaatggagagggagag

SEQ ID NO: 54 - RNA, 18 nt, synthetic construct
  source 1..18: mol_type = other RNA
  modified_base 1: mod_base = OTHER; note = 2'-O-methoxyethyl modified nucleotide
  modified_base 2: mod_base = OTHER; note = 2'-O-methoxyethyl modified nucleotide
  modified_base 3: mod_base = OTHER; note = 2'-O-methoxyethyl modified nucleotide
  modified_base 4: mod_base = OTHER; note = 2'-O-methoxyethyl modified nucleotide
  modified_base 5: mod_base = OTHER; note = 2'-O-methoxyethyl modified nucleotide
  modified_base 6: mod_base = OTHER; note = 2'-O-methoxyethyl modified nucleotide
  modified_base 7: mod_base = OTHER; note = 2'-O-methoxyethyl modified nucleotide
  modified_base 8: mod_base = OTHER; note = 2'-O-methoxyethyl modified nucleotide
  modified_base 9: mod_base = OTHER; note = 2'-O-methoxyethyl modified nucleotide
  modified_base 10: mod_base = OTHER; note = 2'-O-methoxyethyl modified nucleotide
  modified_base 11: mod_base = OTHER; note = 2'-O-methoxyethyl modified thymine
  modified_base 12: mod_base = OTHER; note = 2'-O-methoxyethyl modified nucleotide
  modified_base 13: mod_base = OTHER; note = 2'-O-methoxyethyl modified nucleotide
  modified_base 14: mod_base = OTHER; note = 2'-O-methoxyethyl modified nucleotide
  modified_base 15: mod_base = OTHER; note = 2'-O-methoxyethyl modified nucleotide
  modified_base 16: mod_base = OTHER; note = 2'-O-methoxyethyl modified nucleotide
  modified_base 17: mod_base = OTHER; note = 2'-O-methoxyethyl modified nucleotide
  modified_base 18: mod_base = OTHER; note = 2'-O-methoxyethyl modified nucleotide
gagagagaaatggaggga

SEQ ID NO: 55 - RNA, 18 nt, synthetic construct
  source 1..18: mol_type = other RNA
  modified_base 1: mod_base = OTHER; note = 2'-O-methoxyethyl modified thymine
  modified_base 2: mod_base = OTHER; note = 2'-O-methoxyethyl modified thymine
  modified_base 3: mod_base = OTHER; note = 2'-O-methoxyethyl modified nucleotide
  modified_base 4: mod_base = OTHER; note = 2'-O-methoxyethyl modified nucleotide
  modified_base 5: mod_base = OTHER; note = 2'-O-methoxyethyl modified nucleotide
  modified_base 6: mod_base = OTHER; note = 2'-O-methoxyethyl modified nucleotide
  modified_base 7: mod_base = OTHER; note = 2'-O-methoxyethyl modified nucleotide
  modified_base 8: mod_base = OTHER; note = 2'-O-methoxyethyl modified nucleotide
  modified_base 9: mod_base = OTHER; note = 2'-O-methoxyethyl modified nucleotide
  modified_base 10: mod_base = OTHER; note = 2'-O-methoxyethyl modified nucleotide
  modified_base 11: mod_base = OTHER; note = 2'-O-methoxyethyl modified nucleotide
  modified_base 12: mod_base = OTHER; note = 2'-O-methoxyethyl modified nucleotide
  modified_base 13: mod_base = OTHER; note = 2'-O-methoxyethyl modified nucleotide
  modified_base 14: mod_base = OTHER; note = 2'-O-methoxyethyl modified nucleotide
  modified_base 15: mod_base = OTHER; note = 2'-O-methoxyethyl modified nucleotide
  modified_base 16: mod_base = OTHER; note = 2'-O-methoxyethyl modified thymine
  modified_base 17: mod_base = OTHER; note = 2'-O-methoxyethyl modified nucleotide
  modified_base 18: mod_base = OTHER; note = 2'-O-methoxyethyl modified nucleotide
ttagggagagagaaatgg

SEQ ID NO: 56 - RNA, 18 nt, synthetic construct
  source 1..18: mol_type = other RNA
  modified_base 1: mod_base = OTHER; note = 2'-O-methoxyethyl modified nucleotide
  modified_base 2: mod_base = OTHER; note = 2'-O-methoxyethyl modified 5-methylcytosine
  modified_base 3: mod_base = OTHER; note = 2'-O-methoxyethyl modified nucleotide
  modified_base 4: mod_base = OTHER; note = 2'-O-methoxyethyl modified nucleotide
  modified_base 5: mod_base = OTHER; note = 2'-O-methoxyethyl modified nucleotide
  modified_base 6: mod_base = OTHER; note = 2'-O-methoxyethyl modified thymine
  modified_base 7: mod_base = OTHER; note = 2'-O-methoxyethyl modified thymine
  modified_base 8: mod_base = OTHER; note = 2'-O-methoxyethyl modified nucleotide
  modified_base 9: mod_base = OTHER; note = 2'-O-methoxyethyl modified nucleotide
  modified_base 10: mod_base = OTHER; note = 2'-O-methoxyethyl modified nucleotide
  modified_base 11: mod_base = OTHER; note = 2'-O-methoxyethyl modified nucleotide
  modified_base 12: mod_base = OTHER; note = 2'-O-methoxyethyl modified nucleotide
  modified_base 13: mod_base = OTHER; note = 2'-O-methoxyethyl modified nucleotide
  modified_base 14: mod_base = OTHER; note = 2'-O-methoxyethyl modified nucleotide
  modified_base 15: mod_base = OTHER; note = 2'-O-methoxyethyl modified nucleotide
  modified_base 16: mod_base = OTHER; note = 2'-O-methoxyethyl modified nucleotide
  modified_base 17: mod_base = OTHER; note = 2'-O-methoxyethyl modified nucleotide
  modified_base 18: mod_base = OTHER; note = 2'-O-methoxyethyl modified nucleotide
acagattagggagagaga

SEQ ID NO: 57 - RNA, 18 nt, synthetic construct
  source 1..18: mol_type = other RNA
  modified_base 1: mod_base = OTHER; note = 2'-O-methoxyethyl modified nucleotide
  modified_base 2: mod_base = OTHER; note = 2'-O-methoxyethyl modified nucleotide
  modified_base 3: mod_base = OTHER; note = 2'-O-methoxyethyl modified 5-methylcytosine
  modified_base 4: mod_base = OTHER; note = 2'-O-methoxyethyl modified nucleotide
  modified_base 5: mod_base = OTHER; note = 2'-O-methoxyethyl modified nucleotide
  modified_base 6: mod_base = OTHER; note = 2'-O-methoxyethyl modified nucleotide
  modified_base 7: mod_base = OTHER; note = 2'-O-methoxyethyl modified 5-methylcytosine
  modified_base 8: mod_base = OTHER; note = 2'-O-methoxyethyl modified nucleotide
  modified_base 9: mod_base = OTHER; note = 2'-O-methoxyethyl modified nucleotide
  modified_base 10: mod_base = OTHER; note = 2'-O-methoxyethyl modified nucleotide
  modified_base 11: mod_base = OTHER; note = 2'-O-methoxyethyl modified thymine
  modified_base 12: mod_base = OTHER; note = 2'-O-methoxyethyl modified thymine
  modified_base 13: mod_base = OTHER; note = 2'-O-methoxyethyl modified nucleotide
  modified_base 14: mod_base = OTHER; note = 2'-O-methoxyethyl modified nucleotide
  modified_base 15: mod_base = OTHER; note = 2'-O-methoxyethyl modified nucleotide
  modified_base 16: mod_base = OTHER; note = 2'-O-methoxyethyl modified nucleotide
  modified_base 17: mod_base = OTHER; note = 2'-O-methoxyethyl modified nucleotide
  modified_base 18: mod_base = OTHER; note = 2'-O-methoxyethyl modified nucleotide
aacagacagattagggag

SEQ ID NO: 58 - RNA, 18 nt, synthetic construct
  source 1..18: mol_type = other RNA
  modified_base 1: mod_base = OTHER; note = 2'-O-methoxyethyl modified nucleotide
  modified_base 2: mod_base = OTHER; note = 2'-O-methoxyethyl modified nucleotide
  modified_base 3: mod_base = OTHER; note = 2'-O-methoxyethyl modified nucleotide
  modified_base 4: mod_base = OTHER; note = 2'-O-methoxyethyl modified nucleotide
  modified_base 5: mod_base = OTHER; note = 2'-O-methoxyethyl modified nucleotide
  modified_base 6: mod_base = OTHER; note = 2'-O-methoxyethyl modified nucleotide
  modified_base 7: mod_base = OTHER; note = 2'-O-methoxyethyl modified nucleotide
  modified_base 8: mod_base = OTHER; note = 2'-O-methoxyethyl modified 5-methylcytosine
  modified_base 9: mod_base = OTHER; note = 2'-O-methoxyethyl modified nucleotide
  modified_base 10: mod_base = OTHER; note = 2'-O-methoxyethyl modified nucleotide
  modified_base 11: mod_base = OTHER; note = 2'-O-methoxyethyl modified nucleotide
  modified_base 12: mod_base = OTHER; note = 2'-O-methoxyethyl modified 5-methylcytosine
  modified_base 13: mod_base = OTHER; note = 2'-O-methoxyethyl modified nucleotide
  modified_base 14: mod_base = OTHER; note = 2'-O-methoxyethyl modified nucleotide
  modified_base 15: mod_base = OTHER; note = 2'-O-methoxyethyl modified nucleotide
  modified_base 16: mod_base = OTHER; note = 2'-O-methoxyethyl modified thymine
  modified_base 17: mod_base = OTHER; note = 2'-O-methoxyethyl modified thymine
  modified_base 18: mod_base = OTHER; note = 2'-O-methoxyethyl modified nucleotide
gagggaacagacagatta

SEQ ID NO: 59 - RNA, 18 nt, synthetic construct
  source 1..18: mol_type = other RNA
  modified_base 1: mod_base = OTHER; note = 2'-O-methoxyethyl modified thymine
  modified_base 2: mod_base = OTHER; note = 2'-O-methoxyethyl modified nucleotide
  modified_base 3: mod_base = OTHER; note = 2'-O-methoxyethyl modified nucleotide
  modified_base 4: mod_base = OTHER; note = 2'-O-methoxyethyl modified 5-methylcytosine
  modified_base 5: mod_base = OTHER; note = 2'-O-methoxyethyl modified nucleotide
  modified_base 6: mod_base = OTHER; note = 2'-O-methoxyethyl modified nucleotide
  modified_base 7: mod_base = OTHER; note = 2'-O-methoxyethyl modified nucleotide
  modified_base 8: mod_base = OTHER; note = 2'-O-methoxyethyl modified nucleotide
  modified_base 9: mod_base = OTHER; note = 2'-O-methoxyethyl modified nucleotide
  modified_base 10: mod_base = OTHER; note = 2'-O-methoxyethyl modified nucleotide
  modified_base 11: mod_base = OTHER; note = 2'-O-methoxyethyl modified nucleotide
  modified_base 12: mod_base = OTHER; note = 2'-O-methoxyethyl modified nucleotide
  modified_base 13: mod_base = OTHER; note = 2'-O-methoxyethyl modified 5-methylcytosine
  modified_base 14: mod_base = OTHER; note = 2'-O-methoxyethyl modified nucleotide
  modified_base 15: mod_base = OTHER; note = 2'-O-methoxyethyl modified nucleotide
  modified_base 16: mod_base = OTHER; note = 2'-O-methoxyethyl modified nucleotide
  modified_base 17: mod_base = OTHER; note = 2'-O-methoxyethyl modified 5-methylcytosine
  modified_base 18: mod_base = OTHER; note = 2'-O-methoxyethyl modified nucleotide
tggcagagggaacagaca

SEQ ID NO: 60 - RNA, 18 nt, synthetic construct
  source 1..18: mol_type = other RNA
  modified_base 1: mod_base = OTHER; note = 2'-O-methoxyethyl modified nucleotide
  modified_base 2: mod_base = OTHER; note = 2'-O-methoxyethyl modified nucleotide
  modified_base 3: mod_base = OTHER; note = 2'-O-methoxyethyl modified 5-methylcytosine
  modified_base 4: mod_base = OTHER; note = 2'-O-methoxyethyl modified 5-methylcytosine
  modified_base 5: mod_base = OTHER; note = 2'-O-methoxyethyl modified nucleotide
  modified_base 6: mod_base = OTHER; note = 2'-O-methoxyethyl modified thymine
  modified_base 7: mod_base = OTHER; note = 2'-O-methoxyethyl modified nucleotide
  modified_base 8: mod_base = OTHER; note = 2'-O-methoxyethyl modified nucleotide
  modified_base 9: mod_base = OTHER; note = 2'-O-methoxyethyl modified 5-methylcytosine
  modified_base 10: mod_base = OTHER; note = 2'-O-methoxyethyl modified nucleotide
  modified_base 11: mod_base = OTHER; note = 2'-O-methoxyethyl modified nucleotide
  modified_base 12: mod_base = OTHER; note = 2'-O-methoxyethyl modified nucleotide
  modified_base 13: mod_base = OTHER; note = 2'-O-methoxyethyl modified nucleotide
  modified_base 14: mod_base = OTHER; note = 2'-O-methoxyethyl modified nucleotide
  modified_base 15: mod_base = OTHER; note = 2'-O-methoxyethyl modified nucleotide
  modified_base 16: mod_base = OTHER; note = 2'-O-methoxyethyl modified nucleotide
  modified_base 17: mod_base = OTHER; note = 2'-O-methoxyethyl modified nucleotide
  modified_base 18: mod_base = OTHER; note = 2'-O-methoxyethyl modified 5-methylcytosine
ggccatggcagagggaac

SEQ ID NO: 61 - RNA, 18 nt, synthetic construct
  source 1..18: mol_type = other RNA
  modified_base 1: mod_base = OTHER; note = 2'-O-methoxyethyl modified nucleotide
  modified_base 2: mod_base = OTHER; note = 2'-O-methoxyethyl modified nucleotide
  modified_base 3: mod_base = OTHER; note = 2'-O-methoxyethyl modified nucleotide
  modified_base 4: mod_base = OTHER; note = 2'-O-methoxyethyl modified nucleotide
  modified_base 5: mod_base = OTHER; note = 2'-O-methoxyethyl modified nucleotide
  modified_base 6: mod_base = OTHER; note = 2'-O-methoxyethyl modified nucleotide
  modified_base 7: mod_base = OTHER; note = 2'-O-methoxyethyl modified nucleotide
  modified_base 8: mod_base = OTHER; note = 2'-O-methoxyethyl modified 5-methylcytosine
  modified_base 9: mod_base = OTHER; note = 2'-O-methoxyethyl modified 5-methylcytosine
  modified_base 10: mod_base = OTHER; note = 2'-O-methoxyethyl modified nucleotide
  modified_base 11: mod_base = OTHER; note = 2'-O-methoxyethyl modified thymine
  modified_base 12: mod_base = OTHER; note = 2'-O-methoxyethyl modified nucleotide
  modified_base 13: mod_base = OTHER; note = 2'-O-methoxyethyl modified nucleotide
  modified_base 14: mod_base = OTHER; note = 2'-O-methoxyethyl modified 5-methylcytosine
  modified_base 15: mod_base = OTHER; note = 2'-O-methoxyethyl modified nucleotide
  modified_base 16: mod_base = OTHER; note = 2'-O-methoxyethyl modified nucleotide
  modified_base 17: mod_base = OTHER; note = 2'-O-methoxyethyl modified nucleotide
  modified_base 18: mod_base = OTHER; note = 2'-O-methoxyethyl modified nucleotide
aagggagccatggcagag

SEQ ID NO: 62 - RNA, 18 nt, synthetic construct
  source 1..18: mol_type = other RNA
  modified_base 1: mod_base = OTHER; note = 2'-O-methoxyethyl modified thymine
  modified_base 2: mod_base = OTHER; note = 2'-O-methoxyethyl modified nucleotide
  modified_base 3: mod_base = OTHER; note = 2'-O-methoxyethyl modified nucleotide
  modified_base 4: mod_base = OTHER; note = 2'-O-methoxyethyl modified nucleotide
  modified_base 5: mod_base = OTHER; note = 2'-O-methoxyethyl modified nucleotide
  modified_base 6: mod_base = OTHER; note = 2'-O-methoxyethyl modified nucleotide
  modified_base 7: mod_base = OTHER; note = 2'-O-methoxyethyl modified nucleotide
  modified_base 8: mod_base = OTHER; note = 2'-O-methoxyethyl modified nucleotide
  modified_base 9: mod_base = OTHER; note = 2'-O-methoxyethyl modified nucleotide
  modified_base 10: mod_base = OTHER; note = 2'-O-methoxyethyl modified nucleotide
  modified_base 11: mod_base = OTHER; note = 2'-O-methoxyethyl modified nucleotide
  modified_base 12: mod_base = OTHER; note = 2'-O-methoxyethyl modified nucleotide
  modified_base 13: mod_base = OTHER; note = 2'-O-methoxyethyl modified 5-methylcytosine
  modified_base 14: mod_base = OTHER; note = 2'-O-methoxyethyl modified 5-methylcytosine
  modified_base 15: mod_base = OTHER; note = 2'-O-methoxyethyl modified nucleotide
  modified_base 16: mod_base = OTHER; note = 2'-O-methoxyethyl modified thymine
  modified_base 17: mod_base = OTHER; note = 2'-O-methoxyethyl modified nucleotide
  modified_base 18: mod_base = OTHER; note = 2'-O-methoxyethyl modified nucleotide
tgaagaaggaggccatgg

SEQ ID NO: 63 - RNA, 18 nt, synthetic construct
  source 1..18: mol_type = other RNA
  modified_base 1: mod_base = OTHER; note = 2'-O-methoxyethyl modified 5-methylcytosine
  modified_base 2: mod_base = OTHER; note = 2'-O-methoxyethyl modified thymine
  modified_base 3: mod_base = OTHER; note = 2'-O-methoxyethyl modified nucleotide
  modified_base 4: mod_base = OTHER; note = 2'-O-methoxyethyl modified 5-methylcytosine
  modified_base 5: mod_base = OTHER; note = 2'-O-methoxyethyl modified thymine
  modified_base 6: mod_base = OTHER; note = 2'-O-methoxyethyl modified thymine
  modified_base 7: mod_base = OTHER; note = 2'-O-methoxyethyl modified nucleotide
  modified_base 8: mod_base = OTHER; note = 2'-O-methoxyethyl modified nucleotide
  modified_base 9: mod_base = OTHER; note = 2'-O-methoxyethyl modified nucleotide
  modified_base 10: mod_base = OTHER; note = 2'-O-methoxyethyl modified nucleotide
  modified_base 11: mod_base = OTHER; note = 2'-O-methoxyethyl modified nucleotide
  modified_base 12: mod_base = OTHER; note = 2'-O-methoxyethyl modified nucleotide
  modified_base 13: mod_base = OTHER; note = 2'-O-methoxyethyl modified nucleotide
  modified_base 14: mod_base = OTHER; note = 2'-O-methoxyethyl modified nucleotide
  modified_base 15: mod_base = OTHER; note = 2'-O-methoxyethyl modified nucleotide
  modified_base 16: mod_base = OTHER; note = 2'-O-methoxyethyl modified nucleotide
  modified_base 17: mod_base = OTHER; note = 2'-O-methoxyethyl modified nucleotide
  modified_base 18: mod_base = OTHER; note = 2'-O-methoxyethyl modified 5-methylcytosine
ctgcttgaagaagagggc

SEQ ID NO: 64 - RNA, 18 nt, synthetic construct
  source 1..18: mol_type = other RNA
  modified_base 1: mod_base = OTHER; note = 2'-O-methoxyethyl modified nucleotide
  modified_base 2: mod_base = OTHER; note = 2'-O-methoxyethyl modified nucleotide
  modified_base 3: mod_base = OTHER; note = 2'-O-methoxyethyl modified nucleotide
  modified_base 4: mod_base = OTHER; note = 2'-O-methoxyethyl modified nucleotide
  modified_base 5: mod_base = OTHER; note = 2'-O-methoxyethyl modified nucleotide
  modified_base 6: mod_base = OTHER; note = 2'-O-methoxyethyl modified 5-methylcytosine
  modified_base 7: mod_base = OTHER; note = 2'-O-methoxyethyl modified thymine
  modified_base 8: mod_base = OTHER; note = 2'-O-methoxyethyl modified nucleotide
  modified_base 9: mod_base = OTHER; note = 2'-O-methoxyethyl modified 5-methylcytosine
  modified_base 10: mod_base = OTHER; note = 2'-O-methoxyethyl modified thymine
  modified_base 11: mod_base = OTHER; note = 2'-O-methoxyethyl modified thymine
  modified_base 12: mod_base = OTHER; note = 2'-O-methoxyethyl modified nucleotide
  modified_base 13: mod_base = OTHER; note = 2'-O-methoxyethyl modified nucleotide
  modified_base 14: mod_base = OTHER; note = 2'-O-methoxyethyl modified nucleotide
  modified_base 15: mod_base = OTHER; note = 2'-O-methoxyethyl modified nucleotide
  modified_base 16: mod_base = OTHER; note = 2'-O-methoxyethyl modified nucleotide
  modified_base 17: mod_base = OTHER; note = 2'-O-methoxyethyl modified nucleotide
  modified_base 18: mod_base = OTHER; note = 2'-O-methoxyethyl modified nucleotide
ggaggctgcttgaagaag

SEQ ID NO: 65 - RNA, 18 nt, synthetic construct
  source 1..18: mol_type = other RNA
  modified_base 1: mod_base = OTHER; note = 2'-O-methoxyethyl modified nucleotide
  modified_base 2: mod_base = OTHER; note = 2'-O-methoxyethyl modified nucleotide
  modified_base 3: mod_base = OTHER; note = 2'-O-methoxyethyl modified nucleotide
  modified_base 4: mod_base = OTHER; note = 2'-O-methoxyethyl modified thymine
  modified_base 5: mod_base = OTHER; note = 2'-O-methoxyethyl modified nucleotide
  modified_base 6: mod_base = OTHER; note = 2'-O-methoxyethyl modified nucleotide
  modified_base 7: mod_base = OTHER; note = 2'-O-methoxyethyl modified nucleotide
  modified_base 8: mod_base = OTHER; note = 2'-O-methoxyethyl modified nucleotide
  modified_base 9: mod_base = OTHER; note = 2'-O-methoxyethyl modified nucleotide
  modified_base 10: mod_base = OTHER; note = 2'-O-methoxyethyl modified nucleotide
  modified_base 11: mod_base = OTHER; note = 2'-O-methoxyethyl modified 5-methylcytosine
  modified_base 12: mod_base = OTHER; note = 2'-O-methoxyethyl modified thymine
  modified_base 13: mod_base = OTHER; note = 2'-O-methoxyethyl modified nucleotide
  modified_base 14: mod_base = OTHER; note = 2'-O-methoxyethyl modified 5-methylcytosine
  modified_base 15: mod_base = OTHER; note = 2'-O-methoxyethyl modified thymine
  modified_base 16: mod_base = OTHER; note = 2'-O-methoxyethyl modified thymine
  modified_base 17: mod_base = OTHER; note = 2'-O-methoxyethyl modified nucleotide
  modified_base 18: mod_base = OTHER; note = 2'-O-methoxyethyl modified nucleotide
agatgggaggctgcttga

SEQ ID NO: 66 - RNA, 18 nt, synthetic construct
  source 1..18: mol_type = other RNA
  modified_base 1: mod_base = OTHER; note = 2'-O-methoxyethyl modified nucleotide
  modified_base 2: mod_base = OTHER; note = 2'-O-methoxyethyl modified nucleotide
  modified_base 3: mod_base = OTHER; note = 2'-O-methoxyethyl modified nucleotide
  modified_base 4: mod_base = OTHER; note = 2'-O-methoxyethyl modified 5-methylcytosine
  modified_base 5: mod_base = OTHER; note = 2'-O-methoxyethyl modified nucleotide
  modified_base 6: mod_base = OTHER; note = 2'-O-methoxyethyl modified nucleotide
  modified_base 7: mod_base = OTHER; note = 2'-O-methoxyethyl modified nucleotide
  modified_base 8: mod_base = OTHER; note = 2'-O-methoxyethyl modified nucleotide
  modified_base 9: mod_base = OTHER; note = 2'-O-methoxyethyl modified thymine
  modified_base 10: mod_base = OTHER; note = 2'-O-methoxyethyl modified nucleotide
  modified_base 11: mod_base = OTHER; note = 2'-O-methoxyethyl modified nucleotide
  modified_base 12: mod_base = OTHER; note = 2'-O-methoxyethyl modified nucleotide
  modified_base 13: mod_base = OTHER; note = 2'-O-methoxyethyl modified nucleotide
  modified_base 14: mod_base = OTHER; note = 2'-O-methoxyethyl modified nucleotide
  modified_base 15: mod_base = OTHER; note = 2'-O-methoxyethyl modified nucleotide
  modified_base 16: mod_base = OTHER; note = 2'-O-methoxyethyl modified 5-methylcytosine
  modified_base 17: mod_base = OTHER; note = 2'-O-methoxyethyl modified thymine
  modified_base 18: mod_base = OTHER; note = 2'-O-methoxyethyl modified nucleotide
gagcaagatgggaggctg

SEQ ID NO: 67 - RNA, 18 nt, synthetic construct
  source 1..18: mol_type = other RNA
  modified_base 1: mod_base = OTHER; note = 2'-O-methoxyethyl modified 5-methylcytosine
  modified_base 2: mod_base = OTHER; note = 2'-O-methoxyethyl modified nucleotide
  modified_base 3: mod_base = OTHER; note = 2'-O-methoxyethyl modified nucleotide
  modified_base 4: mod_base = OTHER; note = 2'-O-methoxyethyl modified nucleotide
  modified_base 5: mod_base = OTHER; note = 2'-O-methoxyethyl modified nucleotide
  modified_base 6: mod_base = OTHER; note = 2'-O-methoxyethyl modified nucleotide
  modified_base 7: mod_base = OTHER; note = 2'-O-methoxyethyl modified 5-methylcytosine
  modified_base 8: mod_base = OTHER; note = 2'-O-methoxyethyl modified nucleotide
  modified_base 9: mod_base = OTHER; note = 2'-O-methoxyethyl modified nucleotide
  modified_base 10: mod_base = OTHER; note = 2'-O-methoxyethyl modified nucleotide
  modified_base 11: mod_base = OTHER; note = 2'-O-methoxyethyl modified nucleotide
  modified_base 12: mod_base = OTHER; note = 2'-O-methoxyethyl modified thymine
  modified_base 13: mod_base = OTHER; note = 2'-O-methoxyethyl modified nucleotide
  modified_base 14: mod_base = OTHER; note = 2'-O-methoxyethyl modified nucleotide
  modified_base 15: mod_base = OTHER; note = 2'-O-methoxyethyl modified nucleotide
  modified_base 16: mod_base = OTHER; note = 2'-O-methoxyethyl modified nucleotide
  modified_base 17: mod_base = OTHER; note = 2'-O-methoxyethyl modified nucleotide
  modified_base 18: mod_base = OTHER; note = 2'-O-methoxyethyl modified nucleotide
caggagcaagatgggagg

SEQ ID NO: 68 - RNA, 18 nt, synthetic construct
  source 1..18: mol_type = other RNA
  modified_base 1: mod_base = OTHER; note = 2'-O-methoxyethyl modified nucleotide
  modified_base 2: mod_base = OTHER; note = 2'-O-methoxyethyl modified nucleotide
  modified_base 3: mod_base = OTHER; note = 2'-O-methoxyethyl modified 5-methylcytosine
  modified_base 4: mod_base = OTHER; note = 2'-O-methoxyethyl modified 5-methylcytosine
  modified_base 5: mod_base = OTHER; note = 2'-O-methoxyethyl modified nucleotide
  modified_base 6: mod_base = OTHER; note = 2'-O-methoxyethyl modified 5-methylcytosine
  modified_base 7: mod_base = OTHER; note = 2'-O-methoxyethyl modified nucleotide
  modified_base 8: mod_base = OTHER; note = 2'-O-methoxyethyl modified nucleotide
  modified_base 9: mod_base = OTHER; note = 2'-O-methoxyethyl modified nucleotide
  modified_base 10: mod_base = OTHER; note = 2'-O-methoxyethyl modified nucleotide
  modified_base 11: mod_base = OTHER; note = 2'-O-methoxyethyl modified nucleotide
  modified_base 12: mod_base = OTHER; note = 2'-O-methoxyethyl modified 5-methylcytosine
  modified_base 13: mod_base = OTHER; note = 2'-O-methoxyethyl modified nucleotide
  modified_base 14: mod_base = OTHER; note = 2'-O-methoxyethyl modified nucleotide
  modified_base 15: mod_base = OTHER; note = 2'-O-methoxyethyl modified nucleotide
  modified_base 16: mod_base = OTHER; note = 2'-O-methoxyethyl modified nucleotide
  modified_base 17: mod_base = OTHER; note = 2'-O-methoxyethyl modified thymine
  modified_base 18: mod_base = OTHER; note = 2'-O-methoxyethyl modified nucleotide
gaccgcaggagcaagatg

SEQ ID NO: 69 - RNA, 18 nt, synthetic construct
  source 1..18: mol_type = other RNA
  modified_base 1: mod_base = OTHER; note = 2'-O-methoxyethyl modified nucleotide
  modified_base 2: mod_base = OTHER; note = 2'-O-methoxyethyl modified nucleotide
  modified_base 3: mod_base = OTHER; note = 2'-O-methoxyethyl modified nucleotide
  modified_base 4: mod_base = OTHER; note = 2'-O-methoxyethyl modified nucleotide
  modified_base 5: mod_base = OTHER; note = 2'-O-methoxyethyl modified nucleotide
  modified_base 6: mod_base = OTHER; note = 2'-O-methoxyethyl modified nucleotide
  modified_base 7: mod_base = OTHER; note = 2'-O-methoxyethyl modified nucleotide
  modified_base 8: mod_base = OTHER; note = 2'-O-methoxyethyl modified 5-methylcytosine
  modified_base 9: mod_base = OTHER; note = 2'-O-methoxyethyl modified 5-methylcytosine
  modified_base 10: mod_base = OTHER; note = 2'-O-methoxyethyl modified nucleotide
  modified_base 11: mod_base = OTHER; note = 2'-O-methoxyethyl modified 5-methylcytosine
  modified_base 12: mod_base = OTHER; note = 2'-O-methoxyethyl modified nucleotide
  modified_base 13: mod_base = OTHER; note = 2'-O-methoxyethyl modified nucleotide
  modified_base 14: mod_base = OTHER; note = 2'-O-methoxyethyl modified nucleotide
  modified_base 15: mod_base = OTHER; note = 2'-O-methoxyethyl modified nucleotide
  modified_base 16: mod_base = OTHER; note = 2'-O-methoxyethyl modified nucleotide
  modified_base 17: mod_base = OTHER; note = 2'-O-methoxyethyl modified 5-methylcytosine
  modified_base 18: mod_base = OTHER; note = 2'-O-methoxyethyl modified nucleotide
ggagggaccgcaggagca

SEQ ID NO: 70 - RNA, 18 nt, synthetic construct
  source 1..18: mol_type = other RNA
  modified_base 1: mod_base = OTHER; note = 2'-O-methoxyethyl modified nucleotide
  modified_base 2: mod_base = OTHER; note = 2'-O-methoxyethyl modified nucleotide
  modified_base 3: mod_base = OTHER; note = 2'-O-methoxyethyl modified nucleotide
  modified_base 4: mod_base = OTHER; note = 2'-O-methoxyethyl modified nucleotide
  modified_base 5: mod_base = OTHER; note = 2'-O-methoxyethyl modified nucleotide
  modified_base 6: mod_base = OTHER; note = 2'-O-methoxyethyl modified nucleotide
  modified_base 7: mod_base = OTHER; note = 2'-O-methoxyethyl modified nucleotide
  modified_base 8: mod_base = OTHER; note = 2'-O-methoxyethyl modified nucleotide
  modified_base 9: mod_base = OTHER; note = 2'-O-methoxyethyl modified nucleotide
  modified_base 10: mod_base = OTHER; note = 2'-O-methoxyethyl modified nucleotide
  modified_base 11: mod_base = OTHER; note = 2'-O-methoxyethyl modified nucleotide
  modified_base 12: mod_base = OTHER; note = 2'-O-methoxyethyl modified nucleotide
  modified_base 13: mod_base = OTHER; note = 2'-O-methoxyethyl modified 5-methylcytosine
  modified_base 14: mod_base = OTHER; note = 2'-O-methoxyethyl modified 5-methylcytosine
  modified_base 15: mod_base = OTHER; note = 2'-O-methoxyethyl modified nucleotide
  modified_base 16: mod_base = OTHER; note = 2'-O-methoxyethyl modified 5-methylcytosine
  modified_base 17: mod_base = OTHER; note = 2'-O-methoxyethyl modified nucleotide
  modified_base 18: mod_base = OTHER; note = 2'-O-methoxyethyl modified nucleotide
gggaaggagggaccgcag

SEQ ID NO: 71 - RNA, 18 nt, synthetic construct
  source 1..18: mol_type = other RNA
  modified_base 1: mod_base = OTHER; note = 2'-O-methoxyethyl modified nucleotide
  modified_base 2: mod_base = OTHER; note = 2'-O-methoxyethyl modified nucleotide
  modified_base 3: mod_base = OTHER; note = 2'-O-methoxyethyl modified nucleotide
  modified_base 4: mod_base = OTHER; note = 2'-O-methoxyethyl modified 5-methylcytosine
  modified_base 5: mod_base = OTHER; note = 2'-O-methoxyethyl modified nucleotide
  modified_base 6: mod_base = OTHER; note = 2'-O-methoxyethyl modified nucleotide
  modified_base 7: mod_base = OTHER; note = 2'-O-methoxyethyl modified nucleotide
  modified_base 8: mod_base = OTHER; note = 2'-O-methoxyethyl modified nucleotide
  modified_base 9: mod_base = OTHER; note = 2'-O-methoxyethyl modified nucleotide
  modified_base 10: mod_base = OTHER; note = 2'-O-methoxyethyl modified nucleotide
  modified_base 11: mod_base = OTHER; note = 2'-O-methoxyethyl modified nucleotide
  modified_base 12: mod_base = OTHER; note = 2'-O-methoxyethyl modified nucleotide
  modified_base 13: mod_base = OTHER; note = 2'-O-methoxyethyl modified nucleotide
  modified_base 14: mod_base = OTHER; note = 2'-O-methoxyethyl modified nucleotide
  modified_base 15: mod_base = OTHER; note = 2'-O-methoxyethyl modified nucleotide
  modified_base 16: mod_base = OTHER; note = 2'-O-methoxyethyl modified nucleotide
  modified_base 17: mod_base = OTHER; note = 2'-O-methoxyethyl modified nucleotide
  modified_base 18: mod_base = OTHER; note = 2'-O-methoxyethyl modified 5-methylcytosine
agacagggaaggagggac

SEQ ID NO: 72 - RNA, 18 nt, synthetic construct
  source 1..18: mol_type = other RNA
  modified_base 1: mod_base = OTHER; note = 2'-O-methoxyethyl modified nucleotide
  modified_base 2: mod_base = OTHER; note = 2'-O-methoxyethyl modified nucleotide
  modified_base 3: mod_base = OTHER; note = 2'-O-methoxyethyl modified nucleotide
  modified_base 4: mod_base = OTHER; note = 2'-O-methoxyethyl modified nucleotide
  modified_base 5: mod_base = OTHER; note = 2'-O-methoxyethyl modified nucleotide
  modified_base 6: mod_base = OTHER; note = 2'-O-methoxyethyl modified nucleotide
  modified_base 7: mod_base = OTHER; note = 2'-O-methoxyethyl modified nucleotide
  modified_base 8: mod_base = OTHER; note = 2'-O-methoxyethyl modified nucleotide
  modified_base 9: mod_base = OTHER; note = 2'-O-methoxyethyl modified 5-methylcytosine
  modified_base 10: mod_base = OTHER; note = 2'-O-methoxyethyl modified nucleotide
  modified_base 11: mod_base = OTHER; note = 2'-O-methoxyethyl modified nucleotide
  modified_base 12: mod_base = OTHER; note = 2'-O-methoxyethyl modified nucleotide
  modified_base 13: mod_base = OTHER; note = 2'-O-methoxyethyl modified nucleotide
  modified_base 14: mod_base = OTHER; note = 2'-O-methoxyethyl modified nucleotide
  modified_base 15: mod_base = OTHER; note = 2'-O-methoxyethyl modified nucleotide
  modified_base 16: mod_base = OTHER; note = 2'-O-methoxyethyl modified nucleotide
  modified_base 17: mod_base = OTHER; note = 2'-O-methoxyethyl modified nucleotide
  modified_base 18: mod_base = OTHER; note = 2'-O-methoxyethyl modified nucleotide
gagagagacagggaagga

SEQ ID NO: 73 - RNA, 18 nt, synthetic construct
  source 1..18: mol_type = other RNA
  modified_base 1: mod_base = OTHER; note = 2'-O-methoxyethyl modified nucleotide
  modified_base 2: mod_base = OTHER; note = 2'-O-methoxyethyl modified nucleotide
  modified_base 3: mod_base = OTHER; note = 2'-O-methoxyethyl modified nucleotide
  modified_base 4: mod_base = OTHER; note = 2'-O-methoxyethyl modified nucleotide
  modified_base 5: mod_base = OTHER; note = 2'-O-methoxyethyl modified thymine
  modified_base 6: mod_base = OTHER; note = 2'-O-methoxyethyl modified nucleotide
  modified_base 7: mod_base = OTHER; note = 2'-O-methoxyethyl modified nucleotide
  modified_base 8: mod_base = OTHER; note = 2'-O-methoxyethyl modified nucleotide
  modified_base 9: mod_base = OTHER; note = 2'-O-methoxyethyl modified nucleotide
  modified_base 10: mod_base = OTHER; note = 2'-O-methoxyethyl modified nucleotide
  modified_base 11: mod_base = OTHER; note = 2'-O-methoxyethyl modified nucleotide
  modified_base 12: mod_base = OTHER; note = 2'-O-methoxyethyl modified nucleotide
  modified_base 13: mod_base = OTHER; note = 2'-O-methoxyethyl modified nucleotide
  modified_base 14: mod_base = OTHER; note = 2'-O-methoxyethyl modified 5-methylcytosine
  modified_base 15: mod_base = OTHER; note = 2'-O-methoxyethyl modified nucleotide
  modified_base 16: mod_base = OTHER; note = 2'-O-methoxyethyl modified nucleotide
  modified_base 17: mod_base = OTHER; note = 2'-O-methoxyethyl modified nucleotide
  modified_base 18: mod_base = OTHER; note = 2'-O-methoxyethyl modified nucleotide
agggtgagagagacaggg

SEQ ID NO: 74 - RNA, 18 nt, synthetic construct
  source 1..18: mol_type = other RNA
  modified_base 1: mod_base = OTHER; note = 2'-O-methoxyethyl modified nucleotide
  modified_base 2: mod_base = OTHER; note = 2'-O-methoxyethyl modified nucleotide
  modified_base 3: mod_base = OTHER; note = 2'-O-methoxyethyl modified nucleotide
  modified_base 4: mod_base = OTHER; note = 2'-O-methoxyethyl modified 5-methylcytosine
  modified_base 5: mod_base = OTHER; note = 2'-O-methoxyethyl modified nucleotide
  modified_base 6: mod_base = OTHER; note = 2'-O-methoxyethyl modified nucleotide
  modified_base 7: mod_base = OTHER; note = 2'-O-methoxyethyl modified nucleotide
  modified_base 8: mod_base = OTHER; note = 2'-O-methoxyethyl modified nucleotide
  modified_base 9: mod_base = OTHER; note = 2'-O-methoxyethyl modified nucleotide
  modified_base 10: mod_base = OTHER; note = 2'-O-methoxyethyl modified thymine
  modified_base 11: mod_base = OTHER; note = 2'-O-methoxyethyl modified nucleotide
  modified_base 12: mod_base = OTHER; note = 2'-O-methoxyethyl modified nucleotide
  modified_base 13: mod_base = OTHER; note = 2'-O-methoxyethyl modified nucleotide
  modified_base 14: mod_base = OTHER; note = 2'-O-methoxyethyl modified nucleotide
  modified_base 15: mod_base = OTHER; note = 2'-O-methoxyethyl modified nucleotide
  modified_base 16: mod_base = OTHER; note = 2'-O-methoxyethyl modified nucleotide
  modified_base 17: mod_base = OTHER; note = 2'-O-methoxyethyl modified nucleotide
  modified_base 18: mod_base = OTHER; note = 2'-O-methoxyethyl modified nucleotide
aaacagggatgagagaga

SEQ ID NO: 75 - RNA, 18 nt, synthetic construct
  source 1..18: mol_type = other RNA
  modified_base 1: mod_base = OTHER; note = 2'-O-methoxyethyl modified thymine
  modified_base 2: mod_base = OTHER; note = 2'-O-methoxyethyl modified nucleotide
  modified_base 3: mod_base = OTHER; note = 2'-O-methoxyethyl modified thymine
  modified_base 4: mod_base = OTHER; note = 2'-O-methoxyethyl modified nucleotide
  modified_base 5: mod_base = OTHER; note = 2'-O-methoxyethyl modified nucleotide
  modified_base 6: mod_base = OTHER; note = 2'-O-methoxyethyl modified nucleotide
  modified_base 7: mod_base = OTHER; note = 2'-O-methoxyethyl modified nucleotide
  modified_base 8: mod_base = OTHER; note = 2'-O-methoxyethyl modified nucleotide
  modified_base 9: mod_base = OTHER; note = 2'-O-methoxyethyl modified 5-methylcytosine
  modified_base 10: mod_base = OTHER; note = 2'-O-methoxyethyl modified nucleotide
  modified_base 11: mod_base = OTHER; note = 2'-O-methoxyethyl modified nucleotide
  modified_base 12: mod_base = OTHER; note = 2'-O-methoxyethyl modified nucleotide
  modified_base 13: mod_base = OTHER; note = 2'-O-methoxyethyl modified nucleotide
  modified_base 14: mod_base = OTHER; note = 2'-O-methoxyethyl modified nucleotide
  modified_base 15: mod_base = OTHER; note = 2'-O-methoxyethyl modified thymine
  modified_base 16: mod_base = OTHER; note = 2'-O-methoxyethyl modified nucleotide
  modified_base 17: mod_base = OTHER; note = 2'-O-methoxyethyl modified nucleotide
  modified_base 18: mod_base = OTHER; note = 2'-O-methoxyethyl modified nucleotide
tgtggaaacaagggtgag

SEQ ID NO: 76 - RNA, 18 nt, synthetic construct
  source 1..18: mol_type = other RNA
  modified_base 1: mod_base = OTHER; note = 2'-O-methoxyethyl modified nucleotide
  modified_base 2: mod_base = OTHER; note = 2'-O-methoxyethyl modified nucleotide
  modified_base 3: mod_base = OTHER; note = 2'-O-methoxyethyl modified nucleotide
  modified_base 4: mod_base = OTHER; note = 2'-O-methoxyethyl modified nucleotide
  modified_base 5: mod_base = OTHER; note = 2'-O-methoxyethyl modified nucleotide
  modified_base 6: mod_base = OTHER; note = 2'-O-methoxyethyl modified thymine
  modified_base 7: mod_base = OTHER; note = 2'-O-methoxyethyl modified nucleotide
  modified_base 8: mod_base = OTHER; note = 2'-O-methoxyethyl modified thymine
  modified_base 9: mod_base = OTHER; note = 2'-O-methoxyethyl modified nucleotide
  modified_base 10: mod_base = OTHER; note = 2'-O-methoxyethyl modified nucleotide
  modified_base 11: mod_base = OTHER; note = 2'-O-methoxyethyl modified nucleotide
  modified_base 12: mod_base = OTHER; note = 2'-O-methoxyethyl modified nucleotide
  modified_base 13: mod_base = OTHER; note = 2'-O-methoxyethyl modified nucleotide
  modified_base 14: mod_base = OTHER; note = 2'-O-methoxyethyl modified 5-methylcytosine
  modified_base 15: mod_base = OTHER; note = 2'-O-methoxyethyl modified nucleotide
  modified_base 16: mod_base = OTHER; note = 2'-O-methoxyethyl modified nucleotide
  modified_base 17: mod_base = OTHER; note = 2'-O-methoxyethyl modified nucleotide
  modified_base 18: mod_base = OTHER; note = 2'-O-methoxyethyl modified nucleotide
gagggtgtggaaacaggg

SEQ ID NO: 77 - RNA, 18 nt, synthetic construct
  source 1..18: mol_type = other RNA
  modified_base 1: mod_base = OTHER; note = 2'-O-methoxyethyl modified nucleotide
  modified_base 2: mod_base = OTHER; note = 2'-O-methoxyethyl modified nucleotide
  modified_base 3: mod_base = OTHER; note = 2'-O-methoxyethyl modified nucleotide
  modified_base 4: mod_base = OTHER; note = 2'-O-methoxyethyl modified nucleotide
  modified_base 5: mod_base = OTHER; note = 2'-O-methoxyethyl modified thymine
  modified_base 6: mod_base = OTHER; note = 2'-O-methoxyethyl modified nucleotide
  modified_base 7: mod_base = OTHER; note = 2'-O-methoxyethyl modified nucleotide
  modified_base 8: mod_base = OTHER; note = 2'-O-methoxyethyl modified nucleotide
  modified_base 9: mod_base = OTHER; note = 2'-O-methoxyethyl modified nucleotide
  modified_base 10: mod_base = OTHER; note = 2'-O-methoxyethyl modified nucleotide
  modified_base 11: mod_base = OTHER; note = 2'-O-methoxyethyl modified thymine
  modified_base 12: mod_base = OTHER; note = 2'-O-methoxyethyl modified nucleotide
  modified_base 13: mod_base = OTHER; note = 2'-O-methoxyethyl modified thymine
  modified_base 14: mod_base = OTHER; note = 2'-O-methoxyethyl modified nucleotide
  modified_base 15: mod_base = OTHER; note = 2'-O-methoxyethyl modified nucleotide
  modified_base 16: mod_base = OTHER; note = 2'-O-methoxyethyl modified nucleotide
  modified_base 17: mod_base = OTHER; note = 2'-O-methoxyethyl modified nucleotide
  modified_base 18: mod_base = OTHER; note = 2'-O-methoxyethyl modified nucleotide
gaggtgagggtgtggaaa

SEQ ID NO: 78 - RNA, 18 nt, synthetic construct
  source 1..18: mol_type = other RNA
  modified_base 1: mod_base = OTHER; note = 2'-O-methoxyethyl modified nucleotide
  modified_base 2: mod_base = OTHER; note = 2'-O-methoxyethyl modified nucleotide
  modified_base 3: mod_base = OTHER; note = 2'-O-methoxyethyl modified thymine
  modified_base 4: mod_base = OTHER; note = 2'-O-methoxyethyl modified nucleotide
  modified_base 5: mod_base = OTHER; note = 2'-O-methoxyethyl modified nucleotide
  modified_base 6: mod_base = OTHER; note = 2'-O-methoxyethyl modified nucleotide
  modified_base 7: mod_base = OTHER; note = 2'-O-methoxyethyl modified nucleotide
  modified_base 8: mod_base = OTHER; note = 2'-O-methoxyethyl modified nucleotide
  modified_base 9: mod_base = OTHER; note = 2'-O-methoxyethyl modified nucleotide
  modified_base 10: mod_base = OTHER; note = 2'-O-methoxyethyl modified thymine
  modified_base 11: mod_base = OTHER; note = 2'-O-methoxyethyl modified nucleotide
  modified_base 12: mod_base = OTHER; note = 2'-O-methoxyethyl modified nucleotide
  modified_base 13: mod_base = OTHER; note = 2'-O-methoxyethyl modified nucleotide
  modified_base 14: mod_base = OTHER; note = 2'-O-methoxyethyl modified nucleotide
  modified_base 15: mod_base = OTHER; note = 2'-O-methoxyethyl modified nucleotide
  modified_base 16: mod_base = OTHER; note = 2'-O-methoxyethyl modified thymine
  modified_base 17: mod_base = OTHER; note = 2'-O-methoxyethyl modified nucleotide
  modified_base 18: mod_base = OTHER; note = 2'-O-methoxyethyl modified thymine
ggtaggaggtgagggtgt

SEQ ID NO: 79 - RNA, 18 nt, synthetic construct
  source 1..18: mol_type = other RNA
  modified_base 1: mod_base = OTHER; note = 2'-O-methoxyethyl modified nucleotide
  modified_base 2: mod_base = OTHER; note = 2'-O-methoxyethyl modified nucleotide
  modified_base 3: mod_base = OTHER; note = 2'-O-methoxyethyl modified nucleotide
  modified_base 4: mod_base = OTHER; note = 2'-O-methoxyethyl modified nucleotide
  modified_base 5: mod_base = OTHER; note = 2'-O-methoxyethyl modified thymine
  modified_base 6: mod_base = OTHER; note = 2'-O-methoxyethyl modified nucleotide
  modified_base 7: mod_base = OTHER; note = 2'-O-methoxyethyl modified nucleotide
  modified_base 8: mod_base = OTHER; note = 2'-O-methoxyethyl modified thymine
  modified_base 9: mod_base = OTHER; note = 2'-O-methoxyethyl modified nucleotide
  modified_base 10: mod_base = OTHER; note = 2'-O-methoxyethyl modified nucleotide
  modified_base 11: mod_base = OTHER; note = 2'-O-methoxyethyl modified nucleotide
  modified_base 12: mod_base = OTHER; note = 2'-O-methoxyethyl modified nucleotide
  modified_base 13: mod_base = OTHER; note = 2'-O-methoxyethyl modified nucleotide
  modified_base 14: mod_base = OTHER; note = 2'-O-methoxyethyl modified nucleotide
  modified_base 15: mod_base = OTHER; note = 2'-O-methoxyethyl modified thymine
  modified_base 16: mod_base = OTHER; note = 2'-O-methoxyethyl modified nucleotide
  modified_base 17: mod_base = OTHER; note = 2'-O-methoxyethyl modified nucleotide
  modified_base 18: mod_base = OTHER; note = 2'-O-methoxyethyl modified nucleotide
agggtggtaggaggtgag

SEQ ID NO: 80 - RNA, 18 nt, synthetic construct
  source 1..18: mol_type = other RNA
  modified_base 1: mod_base = OTHER; note = 2'-O-methoxyethyl modified thymine
  modified_base 2: mod_base = OTHER; note = 2'-O-methoxyethyl modified nucleotide
  modified_base 3: mod_base = OTHER; note = 2'-O-methoxyethyl modified nucleotide
  modified_base 4: mod_base = OTHER; note = 2'-O-methoxyethyl modified nucleotide
  modified_base 5: mod_base = OTHER; note = 2'-O-methoxyethyl modified nucleotide
  modified_base 6: mod_base = OTHER; note = 2'-O-methoxyethyl modified nucleotide
  modified_base 7: mod_base = OTHER; note = 2'-O-methoxyethyl modified nucleotide
  modified_base 8: mod_base = OTHER; note = 2'-O-methoxyethyl modified nucleotide
  modified_base 9: mod_base = OTHER; note = 2'-O-methoxyethyl modified nucleotide
  modified_base 10: mod_base = OTHER; note = 2'-O-methoxyethyl modified thymine
  modified_base 11: mod_base = OTHER; note = 2'-O-methoxyethyl modified nucleotide
  modified_base 12: mod_base = OTHER; note = 2'-O-methoxyethyl modified nucleotide
  modified_base 13: mod_base = OTHER; note = 2'-O-methoxyethyl modified thymine
  modified_base 14: mod_base = OTHER; note = 2'-O-methoxyethyl modified nucleotide
  modified_base 15: mod_base = OTHER; note = 2'-O-methoxyethyl modified nucleotide
  modified_base 16: mod_base = OTHER; note = 2'-O-methoxyethyl modified nucleotide
  modified_base 17: mod_base = OTHER; note = 2'-O-methoxyethyl modified nucleotide
  modified_base 18: mod_base = OTHER; note = 2'-O-methoxyethyl modified nucleotide
tgagggaggtggtaggag

SEQ ID NO: 81 - RNA, 18 nt, synthetic construct
  source 1..18: mol_type = other RNA
  modified_base 1: mod_base = OTHER; note = 2'-O-methoxyethyl modified 5-methylcytosine
  modified_base 2: mod_base = OTHER; note = 2'-O-methoxyethyl modified nucleotide
  modified_base 3: mod_base = OTHER; note = 2'-O-methoxyethyl modified thymine
  modified_base 4: mod_base = OTHER; note = 2'-O-methoxyethyl modified nucleotide
  modified_base 5: mod_base = OTHER; note = 2'-O-methoxyethyl modified 5-methylcytosine
  modified_base 6: mod_base = OTHER; note = 2'-O-methoxyethyl modified thymine
  modified_base 7: mod_base = OTHER; note = 2'-O-methoxyethyl modified nucleotide
  modified_base 8: mod_base = OTHER; note = 2'-O-methoxyethyl modified nucleotide
  modified_base 9: mod_base = OTHER; note = 2'-O-methoxyethyl modified nucleotide
  modified_base 10: mod_base = OTHER; note = 2'-O-methoxyethyl modified nucleotide
  modified_base 11: mod_base = OTHER; note = 2'-O-methoxyethyl modified nucleotide
  modified_base 12: mod_base = OTHER; note = 2'-O-methoxyethyl modified nucleotide
  modified_base 13: mod_base = OTHER; note = 2'-O-methoxyethyl modified nucleotide
  modified_base 14: mod_base = OTHER; note = 2'-O-methoxyethyl modified nucleotide
  modified_base 15: mod_base = OTHER; note = 2'-O-methoxyethyl modified thymine
  modified_base 16: mod_base = OTHER; note = 2'-O-methoxyethyl modified nucleotide
  modified_base 17: mod_base = OTHER; note = 2'-O-methoxyethyl modified nucleotide
  modified_base 18: mod_base = OTHER; note = 2'-O-methoxyethyl modified thymine
catgctgaggagggtggt

SEQ ID NO: 82 - RNA, 18 nt, synthetic construct
  source 1..18: mol_type = other RNA
  modified_base 1: mod_base = OTHER; note = 2'-O-methoxyethyl modified nucleotide
  modified_base 2: mod_base = OTHER; note = 2'-O-methoxyethyl modified nucleotide
  modified_base 3: mod_base = OTHER; note = 2'-O-methoxyethyl modified nucleotide
  modified_base 4: mod_base = OTHER; note = 2'-O-methoxyethyl modified nucleotide
  modified_base 5: mod_base = OTHER; note = 2'-O-methoxyethyl modified nucleotide
  modified_base 6: mod_base = OTHER; note = 2'-O-methoxyethyl modified 5-methylcytosine
  modified_base 7: mod_base = OTHER; note = 2'-O-methoxyethyl modified nucleotide
  modified_base 8: mod_base = OTHER; note = 2'-O-methoxyethyl modified thymine
  modified_base 9: mod_base = OTHER; note = 2'-O-methoxyethyl modified nucleotide
  modified_base 10: mod_base = OTHER; note = 2'-O-methoxyethyl modified 5-methylcytosine
  modified_base 11: mod_base = OTHER; note = 2'-O-methoxyethyl modified thymine
  modified_base 12: mod_base = OTHER; note = 2'-O-methoxyethyl modified nucleotide
  modified_base 13: mod_base = OTHER; note = 2'-O-methoxyethyl modified nucleotide
  modified_base 14: mod_base = OTHER; note = 2'-O-methoxyethyl modified nucleotide
  modified_base 15: mod_base = OTHER; note = 2'-O-methoxyethyl modified nucleotide
  modified_base 16: mod_base = OTHER; note = 2'-O-methoxyethyl modified nucleotide
  modified_base 17: mod_base = OTHER; note = 2'-O-methoxyethyl modified nucleotide
  modified_base 18: mod_base = OTHER; note = 2'-O-methoxyethyl modified nucleotide
gggaacatgctgagaggg

SEQ ID NO: 83 - RNA, 18 nt, synthetic construct
  source 1..18: mol_type = other RNA
  modified_base 1: mod_base = OTHER; note = 2'-O-methoxyethyl modified thymine
  modified_base 2: mod_base = OTHER; note = 2'-O-methoxyethyl modified thymine
  modified_base 3: mod_base = OTHER; note = 2'-O-methoxyethyl modified 5-methylcytosine
  modified_base 4: mod_base = OTHER; note = 2'-O-methoxyethyl modified 5-methylcytosine
  modified_base 5: mod_base = OTHER; note = 2'-O-methoxyethyl modified nucleotide
  modified_base 6: mod_base = OTHER; note = 2'-O-methoxyethyl modified nucleotide
  modified_base 7: mod_base = OTHER; note = 2'-O-methoxyethyl modified nucleotide
  modified_base 8: mod_base = OTHER; note = 2'-O-methoxyethyl modified nucleotide
  modified_base 9: mod_base = OTHER; note = 2'-O-methoxyethyl modified nucleotide
  modified_base 10: mod_base = OTHER; note = 2'-O-methoxyethyl modified nucleotide
  modified_base 11: mod_base = OTHER; note = 2'-O-methoxyethyl modified 5-methylcytosine
  modified_base 12: mod_base = OTHER; note = 2'-O-methoxyethyl modified nucleotide
  modified_base 13: mod_base = OTHER; note = 2'-O-methoxyethyl modified thymine
  modified_base 14: mod_base = OTHER; note = 2'-O-methoxyethyl modified nucleotide
  modified_base 15: mod_base = OTHER; note = 2'-O-methoxyethyl modified 5-methylcytosine
  modified_base 16: mod_base = OTHER; note = 2'-O-methoxyethyl modified thymine
  modified_base 17: mod_base = OTHER; note = 2'-O-methoxyethyl modified nucleotide
  modified_base 18: mod_base = OTHER; note = 2'-O-methoxyethyl modified nucleotide
ttccagggaacatgctga

SEQ ID NO: 84 - RNA, 18 nt, synthetic construct
  source 1..18: mol_type = other RNA
  modified_base 1: mod_base = OTHER; note = 2'-O-methoxyethyl modified thymine
  modified_base 2: mod_base = OTHER; note = 2'-O-methoxyethyl modified 5-methylcytosine
  modified_base 3: mod_base = OTHER; note = 2'-O-methoxyethyl modified nucleotide
  modified_base 4: mod_base = OTHER; note = 2'-O-methoxyethyl modified nucleotide
  modified_base 5: mod_base = OTHER; note = 2'-O-methoxyethyl modified 5-methylcytosine
  modified_base 6: mod_base = OTHER; note = 2'-O-methoxyethyl modified thymine
  modified_base 7: mod_base = OTHER; note = 2'-O-methoxyethyl modified thymine
  modified_base 8: mod_base = OTHER; note = 2'-O-methoxyethyl modified 5-methylcytosine
  modified_base 9: mod_base = OTHER; note = 2'-O-methoxyethyl modified 5-methylcytosine
  modified_base 10: mod_base = OTHER; note = 2'-O-methoxyethyl modified nucleotide
  modified_base 11: mod_base = OTHER; note = 2'-O-methoxyethyl modified nucleotide
  modified_base 12: mod_base = OTHER; note = 2'-O-methoxyethyl modified nucleotide
  modified_base 13: mod_base = OTHER; note = 2'-O-methoxyethyl modified nucleotide
  modified_base 14: mod_base = OTHER; note = 2'-O-methoxyethyl modified nucleotide
  modified_base 15: mod_base = OTHER; note = 2'-O-methoxyethyl modified nucleotide
  modified_base 16: mod_base = OTHER; note = 2'-O-methoxyethyl modified 5-methylcytosine
  modified_base 17: mod_base = OTHER; note = 2'-O-methoxyethyl modified nucleotide
  modified_base 18: mod_base = OTHER; note = 2'-O-methoxyethyl modified thymine
tcagcttccagggaacat

SEQ ID NO: 85 - RNA, 18 nt, synthetic construct
  source 1..18: mol_type = other RNA
  modified_base 1: mod_base = OTHER; note = 2'-O-methoxyethyl modified nucleotide
  modified_base 2: mod_base = OTHER; note = 2'-O-methoxyethyl modified nucleotide
  modified_base 3: mod_base = OTHER; note = 2'-O-methoxyethyl modified nucleotide
  modified_base 4: mod_base = OTHER; note = 2'-O-methoxyethyl modified nucleotide
  modified_base 5: mod_base = OTHER; note = 2'-O-methoxyethyl modified nucleotide
  modified_base 6: mod_base = OTHER; note = 2'-O-methoxyethyl modified nucleotide
  modified_base 7: mod_base = OTHER; note = 2'-O-methoxyethyl modified nucleotide
  modified_base 8: mod_base = OTHER; note = 2'-O-methoxyethyl modified nucleotide
  modified_base 9: mod_base = OTHER; note = 2'-O-methoxyethyl modified nucleotide
  modified_base 10: mod_base = OTHER; note = 2'-O-methoxyethyl modified nucleotide
  modified_base 11: mod_base = OTHER; note = 2'-O-methoxyethyl modified thymine
  modified_base 12: mod_base = OTHER; note = 2'-O-methoxyethyl modified nucleotide
  modified_base 13: mod_base = OTHER; note = 2'-O-methoxyethyl modified nucleotide
  modified_base 14: mod_base = OTHER; note = 2'-O-methoxyethyl modified nucleotide
  modified_base 15: mod_base = OTHER; note = 2'-O-methoxyethyl modified thymine
  modified_base 16: mod_base = OTHER; note = 2'-O-methoxyethyl modified nucleotide
  modified_base 17: mod_base = OTHER; note = 2'-O-methoxyethyl modified nucleotide
  modified_base 18: mod_base = OTHER; note = 2'-O-methoxyethyl modified nucleotide
gggagagagatggatggg

SEQ ID NO: 86 - RNA, 18 nt, synthetic construct
  source 1..18: mol_type = other RNA
  modified_base 1: mod_base = OTHER; note = 2'-O-methoxyethyl modified thymine
  modified_base 2: mod_base = OTHER; note = 2'-O-methoxyethyl modified nucleotide
  modified_base 3: mod_base = OTHER; note = 2'-O-methoxyethyl modified nucleotide
  modified_base 4: mod_base = OTHER; note = 2'-O-methoxyethyl modified nucleotide
  modified_base 5: mod_base = OTHER; note = 2'-O-methoxyethyl modified nucleotide
  modified_base 6: mod_base = OTHER; note = 2'-O-methoxyethyl modified nucleotide
  modified_base 7: mod_base = OTHER; note = 2'-O-methoxyethyl modified nucleotide
  modified_base 8: mod_base = OTHER; note = 2'-O-methoxyethyl modified nucleotide
  modified_base 9: mod_base = OTHER; note = 2'-O-methoxyethyl modified nucleotide
  modified_base 10: mod_base = OTHER; note = 2'-O-methoxyethyl modified nucleotide
  modified_base 11: mod_base = OTHER; note = 2'-O-methoxyethyl modified nucleotide
  modified_base 12: mod_base = OTHER; note = 2'-O-methoxyethyl modified thymine
  modified_base 13: mod_base = OTHER; note = 2'-O-methoxyethyl modified nucleotide
  modified_base 14: mod_base = OTHER; note = 2'-O-methoxyethyl modified nucleotide
  modified_base 15: mod_base = OTHER; note = 2'-O-methoxyethyl modified nucleotide
  modified_base 16: mod_base = OTHER; note = 2'-O-methoxyethyl modified nucleotide
  modified_base 17: mod_base = OTHER; note = 2'-O-methoxyethyl modified nucleotide
  modified_base 18: mod_base = OTHER; note = 2'-O-methoxyethyl modified nucleotide
tgggagagagatggaggg

SEQ ID NO: 87 - RNA, 18 nt, synthetic construct
  source 1..18: mol_type = other RNA
  modified_base 1: mod_base = OTHER; note = 2'-O-methoxyethyl modified nucleotide
  modified_base 2: mod_base = OTHER; note = 2'-O-methoxyethyl modified thymine
  modified_base 3: mod_base = OTHER; note = 2'-O-methoxyethyl modified nucleotide
  modified_base 4: mod_base = OTHER; note = 2'-O-methoxyethyl modified nucleotide
  modified_base 5: mod_base = OTHER; note = 2'-O-methoxyethyl modified nucleotide
  modified_base 6: mod_base = OTHER; note = 2'-O-methoxyethyl modified nucleotide
  modified_base 7: mod_base = OTHER; note = 2'-O-methoxyethyl modified nucleotide
  modified_base 8: mod_base = OTHER; note = 2'-O-methoxyethyl modified nucleotide
  modified_base 9: mod_base = OTHER; note = 2'-O-methoxyethyl modified nucleotide
  modified_base 10: mod_base = OTHER; note = 2'-O-methoxyethyl modified nucleotide
  modified_base 11: mod_base = OTHER; note = 2'-O-methoxyethyl modified nucleotide
  modified_base 12: mod_base = OTHER; note = 2'-O-methoxyethyl modified nucleotide
  modified_base 13: mod_base = OTHER; note = 2'-O-methoxyethyl modified thymine
  modified_base 14: mod_base = OTHER; note = 2'-O-methoxyethyl modified nucleotide
  modified_base 15: mod_base = OTHER; note = 2'-O-methoxyethyl modified nucleotide
  modified_base 16: mod_base = OTHER; note = 2'-O-methoxyethyl modified nucleotide
  modified_base 17: mod_base = OTHER; note = 2'-O-methoxyethyl modified nucleotide
  modified_base 18: mod_base = OTHER; note = 2'-O-methoxyethyl modified nucleotide
gtgggagagagatggagg

SEQ ID NO: 88 - RNA, 18 nt, synthetic construct
  source 1..18: mol_type = other RNA
  modified_base 1: mod_base = OTHER; note = 2'-O-methoxyethyl modified 5-methylcytosine
  modified_base 2: mod_base = OTHER; note = 2'-O-methoxyethyl modified nucleotide
  modified_base 3: mod_base = OTHER; note = 2'-O-methoxyethyl modified thymine
  modified_base 4: mod_base = OTHER; note = 2'-O-methoxyethyl modified nucleotide
  modified_base 5: mod_base = OTHER; note = 2'-O-methoxyethyl modified nucleotide
  modified_base 6: mod_base = OTHER; note = 2'-O-methoxyethyl modified nucleotide
  modified_base 7: mod_base = OTHER; note = 2'-O-methoxyethyl modified nucleotide
  modified_base 8: mod_base = OTHER; note = 2'-O-methoxyethyl modified nucleotide
  modified_base 9: mod_base = OTHER; note = 2'-O-methoxyethyl modified nucleotide
  modified_base 10: mod_base = OTHER; note = 2'-O-methoxyethyl modified nucleotide
  modified_base 11: mod_base = OTHER; note = 2'-O-methoxyethyl modified nucleotide
  modified_base 12: mod_base = OTHER; note = 2'-O-methoxyethyl modified nucleotide
  modified_base 13: mod_base = OTHER; note = 2'-O-methoxyethyl modified nucleotide
  modified_base 14: mod_base = OTHER; note = 2'-O-methoxyethyl modified thymine
  modified_base 15: mod_base = OTHER; note = 2'-O-methoxyethyl modified nucleotide
  modified_base 16: mod_base = OTHER; note = 2'-O-methoxyethyl modified nucleotide
  modified_base 17: mod_base = OTHER; note = 2'-O-methoxyethyl modified nucleotide
  modified_base 18: mod_base = OTHER; note = 2'-O-methoxyethyl modified nucleotide
cgtgggagagagatggag

SEQ ID NO: 89 - RNA, 18 nt, synthetic construct
  source 1..18: mol_type = other RNA
  modified_base 1: mod_base = OTHER; note = 2'-O-methoxyethyl modified 5-methylcytosine
  modified_base 2: mod_base = OTHER; note = 2'-O-methoxyethyl modified nucleotide
  modified_base 3: mod_base = OTHER; note = 2'-O-methoxyethyl modified 5-methylcytosine
  modified_base 4: mod_base = OTHER; note = 2'-O-methoxyethyl modified nucleotide
  modified_base 5: mod_base = OTHER; note = 2'-O-methoxyethyl modified thymine
  modified_base 6: mod_base = OTHER; note = 2'-O-methoxyethyl modified nucleotide
  modified_base 7: mod_base = OTHER; note = 2'-O-methoxyethyl modified nucleotide
  modified_base 8: mod_base = OTHER; note = 2'-O-methoxyethyl modified nucleotide
  modified_base 9: mod_base = OTHER; note = 2'-O-methoxyethyl modified nucleotide
  modified_base 10: mod_base = OTHER; note = 2'-O-methoxyethyl modified nucleotide
  modified_base 11: mod_base = OTHER; note = 2'-O-methoxyethyl modified nucleotide
  modified_base 12: mod_base = OTHER; note = 2'-O-methoxyethyl modified nucleotide
  modified_base 13: mod_base = OTHER; note = 2'-O-methoxyethyl modified nucleotide
  modified_base 14: mod_base = OTHER; note = 2'-O-methoxyethyl modified nucleotide
  modified_base 15: mod_base = OTHER; note = 2'-O-methoxyethyl modified nucleotide
  modified_base 16: mod_base = OTHER; note = 2'-O-methoxyethyl modified thymine
  modified_base 17: mod_base = OTHER; note = 2'-O-methoxyethyl modified nucleotide
  modified_base 18: mod_base = OTHER; note = 2'-O-methoxyethyl modified nucleotide
cacgtgggagagagatgg

SEQ ID NO: 90 - RNA, 18 nt, synthetic construct
  source 1..18: mol_type = other RNA
  modified_base 1: mod_base = OTHER; note = 2'-O-methoxyethyl modified nucleotide
  modified_base 2: mod_base = OTHER; note = 2'-O-methoxyethyl modified 5-methylcytosine
  modified_base 3: mod_base = OTHER; note = 2'-O-methoxyethyl modified nucleotide
  modified_base 4: mod_base = OTHER; note = 2'-O-methoxyethyl modified 5-methylcytosine
  modified_base 5: mod_base = OTHER; note = 2'-O-methoxyethyl modified nucleotide
  modified_base 6: mod_base = OTHER; note = 2'-O-methoxyethyl modified thymine
  modified_base 7: mod_base = OTHER; note = 2'-O-methoxyethyl modified nucleotide
  modified_base 8: mod_base = OTHER; note = 2'-O-methoxyethyl modified nucleotide
  modified_base 9: mod_base = OTHER; note = 2'-O-methoxyethyl modified nucleotide
  modified_base 10: mod_base = OTHER; note = 2'-O-methoxyethyl modified nucleotide
  modified_base 11: mod_base = OTHER; note = 2'-O-methoxyethyl modified nucleotide
  modified_base 12: mod_base = OTHER; note = 2'-O-methoxyethyl modified nucleotide
  modified_base 13: mod_base = OTHER; note = 2'-O-methoxyethyl modified nucleotide
  modified_base 14: mod_base = OTHER; note = 2'-O-methoxyethyl modified nucleotide
  modified_base 15: mod_base = OTHER; note = 2'-O-methoxyethyl modified nucleotide
  modified_base 16: mod_base = OTHER; note = 2'-O-methoxyethyl modified nucleotide
  modified_base 17: mod_base = OTHER; note = 2'-O-methoxyethyl modified thymine
  modified_base 18: mod_base = OTHER; note = 2'-O-methoxyethyl modified nucleotide
acacgtgggagagagatg

SEQ ID NO: 91 - RNA, 18 nt, synthetic construct
  source 1..18: mol_type = other RNA
  modified_base 1: mod_base = OTHER; note = 2'-O-methoxyethyl modified nucleotide
  modified_base 2: mod_base = OTHER; note = 2'-O-methoxyethyl modified nucleotide
  modified_base 3: mod_base = OTHER; note = 2'-O-methoxyethyl modified 5-methylcytosine
  modified_base 4: mod_base = OTHER; note = 2'-O-methoxyethyl modified nucleotide
  modified_base 5: mod_base = OTHER; note = 2'-O-methoxyethyl modified 5-methylcytosine
  modified_base 6: mod_base = OTHER; note = 2'-O-methoxyethyl modified nucleotide
  modified_base 7: mod_base = OTHER; note = 2'-O-methoxyethyl modified thymine
  modified_base 8: mod_base = OTHER; note = 2'-O-methoxyethyl modified nucleotide
  modified_base 9: mod_base = OTHER; note = 2'-O-methoxyethyl modified nucleotide
  modified_base 10: mod_base = OTHER; note = 2'-O-methoxyethyl modified nucleotide
  modified_base 11: mod_base = OTHER; note = 2'-O-methoxyethyl modified nucleotide
  modified_base 12: mod_base = OTHER; note = 2'-O-methoxyethyl modified nucleotide
  modified_base 13: mod_base = OTHER; note = 2'-O-methoxyethyl modified nucleotide
  modified_base 14: mod_base = OTHER; note = 2'-O-methoxyethyl modified nucleotide
  modified_base 15: mod_base = OTHER; note = 2'-O-methoxyethyl modified nucleotide
  modified_base 16: mod_base = OTHER; note = 2'-O-methoxyethyl modified nucleotide
  modified_base 17: mod_base = OTHER; note = 2'-O-methoxyethyl modified nucleotide
  modified_base 18: mod_base = OTHER; note = 2'-O-methoxyethyl modified thymine
gacacgtgggagagagat

SEQ ID NO: 92 - RNA, 18 nt, synthetic construct
  source 1..18: mol_type = other RNA
  modified_base 1: mod_base = OTHER; note = 2'-O-methoxyethyl modified nucleotide
  modified_base 2: mod_base = OTHER; note = 2'-O-methoxyethyl modified nucleotide
  modified_base 3: mod_base = OTHER; note = 2'-O-methoxyethyl modified nucleotide
  modified_base 4: mod_base = OTHER; note = 2'-O-methoxyethyl modified 5-methylcytosine
  modified_base 5: mod_base = OTHER; note = 2'-O-methoxyethyl modified nucleotide
  modified_base 6: mod_base = OTHER; note = 2'-O-methoxyethyl modified 5-methylcytosine
  modified_base 7: mod_base = OTHER; note = 2'-O-methoxyethyl modified nucleotide
  modified_base 8: mod_base = OTHER; note = 2'-O-methoxyethyl modified thymine
  modified_base 9: mod_base = OTHER; note = 2'-O-methoxyethyl modified nucleotide
  modified_base 10: mod_base = OTHER; note = 2'-O-methoxyethyl modified nucleotide
  modified_base 11: mod_base = OTHER; note = 2'-O-methoxyethyl modified nucleotide
  modified_base 12: mod_base = OTHER; note = 2'-O-methoxyethyl modified nucleotide
  modified_base 13: mod_base = OTHER; note = 2'-O-methoxyethyl modified nucleotide
  modified_base 14: mod_base = OTHER; note = 2'-O-methoxyethyl modified nucleotide
  modified_base 15: mod_base = OTHER; note = 2'-O-methoxyethyl modified nucleotide
  modified_base 16: mod_base = OTHER; note = 2'-O-methoxyethyl modified nucleotide
  modified_base 17: mod_base = OTHER; note = 2'-O-methoxyethyl modified nucleotide
  modified_base 18: mod_base = OTHER; note = 2'-O-methoxyethyl modified nucleotide
agacacgtgggagagaga

SEQ ID NO: 93 - RNA, 18 nt, synthetic construct
  source 1..18: mol_type = other RNA
  modified_base 1: mod_base = OTHER; note = 2'-O-methoxyethyl modified nucleotide
  modified_base 2: mod_base = OTHER; note = 2'-O-methoxyethyl modified nucleotide
  modified_base 3: mod_base = OTHER; note = 2'-O-methoxyethyl modified nucleotide
  modified_base 4: mod_base = OTHER; note = 2'-O-methoxyethyl modified nucleotide
  modified_base 5: mod_base = OTHER; note = 2'-O-methoxyethyl modified nucleotide
  modified_base 6: mod_base = OTHER; note = 2'-O-methoxyethyl modified 5-methylcytosine
  modified_base 7: mod_base = OTHER; note = 2'-O-methoxyethyl modified nucleotide
  modified_base 8: mod_base = OTHER; note = 2'-O-methoxyethyl modified 5-methylcytosine
  modified_base 9: mod_base = OTHER; note = 2'-O-methoxyethyl modified nucleotide
  modified_base 10: mod_base = OTHER; note = 2'-O-methoxyethyl modified thymine
  modified_base 11: mod_base = OTHER; note = 2'-O-methoxyethyl modified nucleotide
  modified_base 12: mod_base = OTHER; note = 2'-O-methoxyethyl modified nucleotide
  modified_base 13: mod_base = OTHER; note = 2'-O-methoxyethyl modified nucleotide
  modified_base 14: mod_base = OTHER; note = 2'-O-methoxyethyl modified nucleotide
  modified_base 15: mod_base = OTHER; note = 2'-O-methoxyethyl modified nucleotide
  modified_base 16: mod_base = OTHER; note = 2'-O-methoxyethyl modified nucleotide
  modified_base 17: mod_base = OTHER; note = 2'-O-methoxyethyl modified nucleotide
  modified_base 18: mod_base = OTHER; note = 2'-O-methoxyethyl modified nucleotide
agagacacgtgggagaga

SEQ ID NO: 94 - RNA, 18 nt, synthetic construct
  source 1..18: mol_type = other RNA
  modified_base 1: mod_base = OTHER; note = 2'-O-methoxyethyl modified nucleotide
  modified_base 2: mod_base = OTHER; note = 2'-O-methoxyethyl modified nucleotide
  modified_base 3: mod_base = OTHER; note = 2'-O-methoxyethyl modified nucleotide
  modified_base 4: mod_base = OTHER; note = 2'-O-methoxyethyl modified nucleotide
  modified_base 5: mod_base = OTHER; note = 2'-O-methoxyethyl modified nucleotide
  modified_base 6: mod_base = OTHER; note = 2'-O-methoxyethyl modified nucleotide
  modified_base 7: mod_base = OTHER; note = 2'-O-methoxyethyl modified 5-methylcytosine
  modified_base 8: mod_base = OTHER; note = 2'-O-methoxyethyl modified nucleotide
  modified_base 9: mod_base = OTHER; note = 2'-O-methoxyethyl modified 5-methylcytosine
  modified_base 10: mod_base = OTHER; note = 2'-O-methoxyethyl modified nucleotide
  modified_base 11: mod_base = OTHER; note = 2'-O-methoxyethyl modified thymine
  modified_base 12: mod_base = OTHER; note = 2'-O-methoxyethyl modified nucleotide
  modified_base 13: mod_base = OTHER; note = 2'-O-methoxyethyl modified nucleotide
  modified_base 14: mod_base = OTHER; note = 2'-O-methoxyethyl modified nucleotide
  modified_base 15: mod_base = OTHER; note = 2'-O-methoxyethyl modified nucleotide
  modified_base 16: mod_base = OTHER; note = 2'-O-methoxyethyl modified nucleotide
  modified_base 17: mod_base = OTHER; note = 2'-O-methoxyethyl modified nucleotide
  modified_base 18: mod_base = OTHER; note = 2'-O-methoxyethyl modified nucleotide
gagagacacgtgggagag

SEQ ID NO: 95 - RNA, 18 nt, synthetic construct
  source 1..18: mol_type = other RNA
  modified_base 1: mod_base = OTHER; note = 2'-O-methoxyethyl modified nucleotide
  modified_base 2: mod_base = OTHER; note = 2'-O-methoxyethyl modified nucleotide
  modified_base 3: mod_base = OTHER; note = 2'-O-methoxyethyl modified nucleotide
  modified_base 4: mod_base = OTHER; note = 2'-O-methoxyethyl modified nucleotide
  modified_base 5: mod_base = OTHER; note = 2'-O-methoxyethyl modified nucleotide
  modified_base 6: mod_base = OTHER; note = 2'-O-methoxyethyl modified nucleotide
  modified_base 7: mod_base = OTHER; note = 2'-O-methoxyethyl modified nucleotide
  modified_base 8: mod_base = OTHER; note = 2'-O-methoxyethyl modified 5-methylcytosine
  modified_base 9: mod_base = OTHER; note = 2'-O-methoxyethyl modified nucleotide
  modified_base 10: mod_base = OTHER; note = 2'-O-methoxyethyl modified 5-methylcytosine
  modified_base 11: mod_base = OTHER; note = 2'-O-methoxyethyl modified nucleotide
  modified_base 12: mod_base = OTHER; note = 2'-O-methoxyethyl modified thymine
  modified_base 13: mod_base = OTHER; note = 2'-O-methoxyethyl modified nucleotide
  modified_base 14: mod_base = OTHER; note = 2'-O-methoxyethyl modified nucleotide
  modified_base 15: mod_base = OTHER; note = 2'-O-methoxyethyl modified nucleotide
  modified_base 16: mod_base = OTHER; note = 2'-O-methoxyethyl modified nucleotide
  modified_base 17: mod_base = OTHER; note = 2'-O-methoxyethyl modified nucleotide
  modified_base 18: mod_base = OTHER; note = 2'-O-methoxyethyl modified nucleotide
ggagagacacgtgggaga

SEQ ID NO: 96 - RNA, 18 nt, synthetic construct
  source 1..18: mol_type = other RNA
  modified_base 1: mod_base = OTHER; note = 2'-O-methoxyethyl modified nucleotide
  modified_base 2: mod_base = OTHER; note = 2'-O-methoxyethyl modified nucleotide
  modified_base 3: mod_base = OTHER; note = 2'-O-methoxyethyl modified nucleotide
  modified_base 4: mod_base = OTHER; note = 2'-O-methoxyethyl modified nucleotide
  modified_base 5: mod_base = OTHER; note = 2'-O-methoxyethyl modified nucleotide
  modified_base 6: mod_base = OTHER; note = 2'-O-methoxyethyl modified nucleotide
  modified_base 7: mod_base = OTHER; note = 2'-O-methoxyethyl modified nucleotide
  modified_base 8: mod_base = OTHER; note = 2'-O-methoxyethyl modified nucleotide
  modified_base 9: mod_base = OTHER; note = 2'-O-methoxyethyl modified 5-methylcytosine
  modified_base 10: mod_base = OTHER; note = 2'-O-methoxyethyl modified nucleotide
  modified_base 11: mod_base = OTHER; note = 2'-O-methoxyethyl modified 5-methylcytosine
  modified_base 12: mod_base = OTHER; note = 2'-O-methoxyethyl modified nucleotide
  modified_base 13: mod_base = OTHER; note = 2'-O-methoxyethyl modified thymine
  modified_base 14: mod_base = OTHER; note = 2'-O-methoxyethyl modified nucleotide
  modified_base 15: mod_base = OTHER; note = 2'-O-methoxyethyl modified nucleotide
  modified_base 16: mod_base = OTHER; note = 2'-O-methoxyethyl modified nucleotide
  modified_base 17: mod_base = OTHER; note = 2'-O-methoxyethyl modified nucleotide
  modified_base 18: mod_base = OTHER; note = 2'-O-methoxyethyl modified nucleotide
gggagagacacgtgggag

SEQ ID NO: 97 - RNA, 18 nt, synthetic construct
  source 1..18: mol_type = other RNA
  modified_base 1: mod_base = OTHER; note = 2'-O-methoxyethyl modified nucleotide
  modified_base 2: mod_base = OTHER; note = 2'-O-methoxyethyl modified nucleotide
  modified_base 3: mod_base = OTHER; note = 2'-O-methoxyethyl modified nucleotide
  modified_base 4: mod_base = OTHER; note = 2'-O-methoxyethyl modified nucleotide
  modified_base 5: mod_base = OTHER; note = 2'-O-methoxyethyl modified nucleotide
  modified_base 6: mod_base = OTHER; note = 2'-O-methoxyethyl modified nucleotide
  modified_base 7: mod_base = OTHER; note = 2'-O-methoxyethyl modified 5-methylcytosine
  modified_base 8: mod_base = OTHER; note = 2'-O-methoxyethyl modified nucleotide
  modified_base 9: mod_base = OTHER; note = 2'-O-methoxyethyl modified thymine
  modified_base 10: mod_base = OTHER; note = 2'-O-methoxyethyl modified nucleotide
  modified_base 11: mod_base = OTHER; note = 2'-O-methoxyethyl modified 5-methylcytosine
  modified_base 12: mod_base = OTHER; note = 2'-O-methoxyethyl modified thymine
  modified_base 13: mod_base = OTHER; note = 2'-O-methoxyethyl modified nucleotide
  modified_base 14: mod_base = OTHER; note = 2'-O-methoxyethyl modified nucleotide
  modified_base 15: mod_base = OTHER; note = 2'-O-methoxyethyl modified thymine
  modified_base 16: mod_base = OTHER; note = 2'-O-methoxyethyl modified nucleotide
  modified_base 17: mod_base = OTHER; note = 2'-O-methoxyethyl modified nucleotide
  modified_base 18: mod_base = OTHER; note = 2'-O-methoxyethyl modified nucleotide
agggaacatgctgatggg

SEQ ID NO: 98 - RNA, 18 nt, synthetic construct
  source 1..18: mol_type = other RNA
  modified_base 1: mod_base = OTHER; note = 2'-O-methoxyethyl modified 5-methylcytosine
  modified_base 2: mod_base = OTHER; note = 2'-O-methoxyethyl modified nucleotide
  modified_base 3: mod_base = OTHER; note = 2'-O-methoxyethyl modified nucleotide
  modified_base 4: mod_base = OTHER; note = 2'-O-methoxyethyl modified nucleotide
  modified_base 5: mod_base = OTHER; note = 2'-O-methoxyethyl modified nucleotide
  modified_base 6: mod_base = OTHER; note = 2'-O-methoxyethyl modified nucleotide
  modified_base 7: mod_base = OTHER; note = 2'-O-methoxyethyl modified nucleotide
  modified_base 8: mod_base = OTHER; note = 2'-O-methoxyethyl modified 5-methylcytosine
  modified_base 9: mod_base = OTHER; note = 2'-O-methoxyethyl modified nucleotide
  modified_base 10: mod_base = OTHER; note = 2'-O-methoxyethyl modified thymine
  modified_base 11: mod_base = OTHER; note = 2'-O-methoxyethyl modified nucleotide
  modified_base 12: mod_base = OTHER; note = 2'-O-methoxyethyl modified 5-methylcytosine
  modified_base 13: mod_base = OTHER; note = 2'-O-methoxyethyl modified thymine
  modified_base 14: mod_base = OTHER; note = 2'-O-methoxyethyl modified nucleotide
  modified_base 15: mod_base = OTHER; note = 2'-O-methoxyethyl modified nucleotide
  modified_base 16: mod_base = OTHER; note = 2'-O-methoxyethyl modified nucleotide
  modified_base 17: mod_base = OTHER; note = 2'-O-methoxyethyl modified nucleotide
  modified_base 18: mod_base = OTHER; note = 2'-O-methoxyethyl modified nucleotide
cagggaacatgctgaggg

SEQ ID NO: 99 - RNA, 18 nt, synthetic construct
  source 1..18: mol_type = other RNA
  modified_base 1: mod_base = OTHER; note = 2'-O-methoxyethyl modified 5-methylcytosine
  modified_base 2: mod_base = OTHER; note = 2'-O-methoxyethyl modified 5-methylcytosine
  modified_base 3: mod_base = OTHER; note = 2'-O-methoxyethyl modified nucleotide
  modified_base 4: mod_base = OTHER; note = 2'-O-methoxyethyl modified nucleotide
  modified_base 5: mod_base = OTHER; note = 2'-O-methoxyethyl modified nucleotide
  modified_base 6: mod_base = OTHER; note = 2'-O-methoxyethyl modified nucleotide
  modified_base 7: mod_base = OTHER; note = 2'-O-methoxyethyl modified nucleotide
  modified_base 8: mod_base = OTHER; note = 2'-O-methoxyethyl modified nucleotide
  modified_base 9: mod_base = OTHER; note = 2'-O-methoxyethyl modified 5-methylcytosine
  modified_base 10: mod_base = OTHER; note = 2'-O-methoxyethyl modified nucleotide
  modified_base 11: mod_base = OTHER; note = 2'-O-methoxyethyl modified thymine
  modified_base 12: mod_base = OTHER; note = 2'-O-methoxyethyl modified nucleotide
  modified_base 13: mod_base = OTHER; note = 2'-O-methoxyethyl modified 5-methylcytosine
  modified_base 14: mod_base = OTHER; note = 2'-O-methoxyethyl modified thymine
  modified_base 15: mod_base = OTHER; note = 2'-O-methoxyethyl modified nucleotide
  modified_base 16: mod_base = OTHER; note = 2'-O-methoxyethyl modified nucleotide
  modified_base 17: mod_base = OTHER; note = 2'-O-methoxyethyl modified nucleotide
  modified_base 18: mod_base = OTHER; note = 2'-O-methoxyethyl modified nucleotide
ccagggaacatgctgagg

SEQ ID NO: 100 - RNA, 18 nt, synthetic construct
  source 1..18: mol_type = other RNA
  modified_base 1: mod_base = OTHER; note = 2'-O-methoxyethyl modified thymine
  modified_base 2: mod_base = OTHER; note = 2'-O-methoxyethyl modified 5-methylcytosine
  modified_base 3: mod_base = OTHER; note = 2'-O-methoxyethyl modified 5-methylcytosine
  modified_base 4: mod_base = OTHER; note = 2'-O-methoxyethyl modified nucleotide
  modified_base 5: mod_base = OTHER; note = 2'-O-methoxyethyl modified nucleotide
  modified_base 6: mod_base = OTHER; note = 2'-O-methoxyethyl modified nucleotide
  modified_base 7: mod_base = OTHER; note = 2'-O-methoxyethyl modified nucleotide
  modified_base 8: mod_base = OTHER; note = 2'-O-methoxyethyl modified nucleotide
  modified_base 9: mod_base = OTHER; note = 2'-O-methoxyethyl modified nucleotide
  modified_base 10: mod_base = OTHER; note = 2'-O-methoxyethyl modified 5-methylcytosine
  modified_base 11: mod_base = OTHER; note = 2'-O-methoxyethyl modified nucleotide
  modified_base 12: mod_base = OTHER; note = 2'-O-methoxyethyl modified thymine
  modified_base 13: mod_base = OTHER; note = 2'-O-methoxyethyl modified nucleotide
  modified_base 14: mod_base = OTHER; note = 2'-O-methoxyethyl modified 5-methylcytosine
  modified_base 15: mod_base = OTHER; note = 2'-O-methoxyethyl modified thymine
  modified_base 16: mod_base = OTHER; note = 2'-O-methoxyethyl modified nucleotide
  modified_base 17: mod_base = OTHER; note = 2'-O-methoxyethyl modified nucleotide
  modified_base 18: mod_base = OTHER; note = 2'-O-methoxyethyl modified nucleotide
tccagggaacatgctgag

SEQ ID NO: 101 - RNA, 18 nt, synthetic construct
  source 1..18: mol_type = other RNA
  modified_base 1: mod_base = OTHER; note = 2'-O-methoxyethyl modified 5-methylcytosine
  modified_base 2: mod_base = OTHER; note = 2'-O-methoxyethyl modified thymine
  modified_base 3: mod_base = OTHER; note = 2'-O-methoxyethyl modified thymine
  modified_base 4: mod_base = OTHER; note = 2'-O-methoxyethyl modified 5-methylcytosine
  modified_base 5: mod_base = OTHER; note = 2'-O-methoxyethyl modified 5-methylcytosine
  modified_base 6: mod_base = OTHER; note = 2'-O-methoxyethyl modified nucleotide
  modified_base 7: mod_base = OTHER; note = 2'-O-methoxyethyl modified nucleotide
  modified_base 8: mod_base = OTHER; note = 2'-O-methoxyethyl modified nucleotide
  modified_base 9: mod_base = OTHER; note = 2'-O-methoxyethyl modified nucleotide
  modified_base 10: mod_base = OTHER; note = 2'-O-methoxyethyl modified nucleotide
  modified_base 11: mod_base = OTHER; note = 2'-O-methoxyethyl modified nucleotide
  modified_base 12: mod_base = OTHER; note = 2'-O-methoxyethyl modified 5-methylcytosine
  modified_base 13: mod_base = OTHER; note = 2'-O-methoxyethyl modified nucleotide
  modified_base 14: mod_base = OTHER; note = 2'-O-methoxyethyl modified thymine
  modified_base 15: mod_base = OTHER; note = 2'-O-methoxyethyl modified nucleotide
  modified_base 16: mod_base = OTHER; note = 2'-O-methoxyethyl modified 5-methylcytosine
  modified_base 17: mod_base = OTHER; note = 2'-O-methoxyethyl modified thymine
  modified_base 18: mod_base = OTHER; note = 2'-O-methoxyethyl modified nucleotide
cttccagggaacatgctg

SEQ ID NO: 102 - RNA, 18 nt, synthetic construct
  source 1..18: mol_type = other RNA
  modified_base 1: mod_base = OTHER; note = 2'-O-methoxyethyl modified nucleotide
  modified_base 2: mod_base = OTHER; note = 2'-O-methoxyethyl modified 5-methylcytosine
  modified_base 3: mod_base = OTHER; note = 2'-O-methoxyethyl modified thymine
  modified_base 4: mod_base = OTHER; note = 2'-O-methoxyethyl modified thymine
  modified_base 5: mod_base = OTHER; note = 2'-O-methoxyethyl modified 5-methylcytosine
  modified_base 6: mod_base = OTHER; note = 2'-O-methoxyethyl modified 5-methylcytosine
  modified_base 7: mod_base = OTHER; note = 2'-O-methoxyethyl modified nucleotide
  modified_base 8: mod_base = OTHER; note = 2'-O-methoxyethyl modified nucleotide
  modified_base 9: mod_base = OTHER; note = 2'-O-methoxyethyl modified nucleotide
  modified_base 10: mod_base = OTHER; note = 2'-O-methoxyethyl modified nucleotide
  modified_base 11: mod_base = OTHER; note = 2'-O-methoxyethyl modified nucleotide
  modified_base 12: mod_base = OTHER; note = 2'-O-methoxyethyl modified nucleotide
  modified_base 13: mod_base = OTHER; note = 2'-O-methoxyethyl modified 5-methylcytosine
  modified_base 14: mod_base = OTHER; note = 2'-O-methoxyethyl modified nucleotide
  modified_base 15: mod_base = OTHER; note = 2'-O-methoxyethyl modified thymine
  modified_base 16: mod_base = OTHER; note = 2'-O-methoxyethyl modified nucleotide
  modified_base 17: mod_base = OTHER; note = 2'-O-methoxyethyl modified 5-methylcytosine
  modified_base 18: mod_base = OTHER; note = 2'-O-methoxyethyl modified thymine
gcttccagggaacatgct

SEQ ID NO: 103 - RNA, 18 nt, synthetic construct
  source 1..18: mol_type = other RNA
  modified_base 1: mod_base = OTHER; note = 2'-O-methoxyethyl modified nucleotide
  modified_base 2: mod_base = OTHER; note = 2'-O-methoxyethyl modified nucleotide
  modified_base 3: mod_base = OTHER; note = 2'-O-methoxyethyl modified 5-methylcytosine
  modified_base 4: mod_base = OTHER; note = 2'-O-methoxyethyl modified thymine
  modified_base 5: mod_base = OTHER; note = 2'-O-methoxyethyl modified thymine
  modified_base 6: mod_base = OTHER; note = 2'-O-methoxyethyl modified 5-methylcytosine
  modified_base 7: mod_base = OTHER; note = 2'-O-methoxyethyl modified 5-methylcytosine
  modified_base 8: mod_base = OTHER; note = 2'-O-methoxyethyl modified nucleotide
  modified_base 9: mod_base = OTHER; note = 2'-O-methoxyethyl modified nucleotide
  modified_base 10: mod_base = OTHER; note = 2'-O-methoxyethyl modified nucleotide
  modified_base 11: mod_base = OTHER; note = 2'-O-methoxyethyl modified nucleotide
  modified_base 12: mod_base = OTHER; note = 2'-O-methoxyethyl modified nucleotide
  modified_base 13: mod_base = OTHER; note = 2'-O-methoxyethyl modified nucleotide
  modified_base 14: mod_base = OTHER; note = 2'-O-methoxyethyl modified 5-methylcytosine
  modified_base 15: mod_base = OTHER; note = 2'-O-methoxyethyl modified nucleotide
  modified_base 16: mod_base = OTHER; note = 2'-O-methoxyethyl modified thymine
  modified_base 17: mod_base = OTHER; note = 2'-O-methoxyethyl modified nucleotide
  modified_base 18: mod_base = OTHER; note = 2'-O-methoxyethyl modified 5-methylcytosine
agcttccagggaacatgc

SEQ ID NO: 104 - RNA, 18 nt, synthetic construct
  source 1..18: mol_type = other RNA
  modified_base 1: mod_base = OTHER; note = 2'-O-methoxyethyl modified 5-methylcytosine
  modified_base 2: mod_base = OTHER; note = 2'-O-methoxyethyl modified nucleotide
  modified_base 3: mod_base = OTHER; note = 2'-O-methoxyethyl modified nucleotide
  modified_base 4: mod_base = OTHER; note = 2'-O-methoxyethyl modified 5-methylcytosine
  modified_base 5: mod_base = OTHER; note = 2'-O-methoxyethyl modified thymine
  modified_base 6: mod_base = OTHER; note = 2'-O-methoxyethyl modified thymine
  modified_base 7: mod_base = OTHER; note = 2'-O-methoxyethyl modified 5-methylcytosine
  modified_base 8: mod_base = OTHER; note = 2'-O-methoxyethyl modified 5-methylcytosine
  modified_base 9: mod_base = OTHER; note = 2'-O-methoxyethyl modified nucleotide
  modified_base 10: mod_base = OTHER; note = 2'-O-methoxyethyl modified nucleotide
  modified_base 11: mod_base = OTHER; note = 2'-O-methoxyethyl modified nucleotide
  modified_base 12: mod_base = OTHER; note = 2'-O-methoxyethyl modified nucleotide
  modified_base 13: mod_base = OTHER; note = 2'-O-methoxyethyl modified nucleotide
  modified_base 14: mod_base = OTHER; note = 2'-O-methoxyethyl modified nucleotide
  modified_base 15: mod_base = OTHER; note = 2'-O-methoxyethyl modified 5-methylcytosine
  modified_base 16: mod_base = OTHER; note = 2'-O-methoxyethyl modified nucleotide
  modified_base 17: mod_base = OTHER; note = 2'-O-methoxyethyl modified thymine
  modified_base 18: mod_base = OTHER; note = 2'-O-methoxyethyl modified nucleotide
cagcttccagggaacatg

SEQ ID NO: 105 - RNA, 16 nt, synthetic construct
  source 1..16: mol_type = other RNA
  modified_base 1: mod_base = OTHER; note = 2'-O-methoxyethyl modified nucleotide
  modified_base 2: mod_base = OTHER; note = 2'-O-methoxyethyl modified nucleotide
  modified_base 3: mod_base = OTHER; note = 2'-O-methoxyethyl modified nucleotide
  modified_base 4: mod_base = OTHER; note = 2'-O-methoxyethyl modified nucleotide
  modified_base 5: mod_base = OTHER; note = 2'-O-methoxyethyl modified 5-methylcytosine
  modified_base 6: mod_base = OTHER; note = 2'-O-methoxyethyl modified nucleotide
  modified_base 7: mod_base = OTHER; note = 2'-O-methoxyethyl modified 5-methylcytosine
  modified_base 8: mod_base = OTHER; note = 2'-O-methoxyethyl modified nucleotide
  modified_base 9: mod_base = OTHER; note = 2'-O-methoxyethyl modified thymine
  modified_base 10: mod_base = OTHER; note = 2'-O-methoxyethyl modified nucleotide
  modified_base 11: mod_base = OTHER; note = 2'-O-methoxyethyl modified nucleotide
  modified_base 12: mod_base = OTHER; note = 2'-O-methoxyethyl modified nucleotide
  modified_base 13: mod_base = OTHER; note = 2'-O-methoxyethyl modified nucleotide
  modified_base 14: mod_base = OTHER; note = 2'-O-methoxyethyl modified nucleotide
  modified_base 15: mod_base = OTHER; note = 2'-O-methoxyethyl modified nucleotide
  modified_base 16: mod_base = OTHER; note = 2'-O-methoxyethyl modified nucleotide
gagacacgtgggagag

SEQ ID NO: 106 - RNA, 16 nt, synthetic construct
  source 1..16: mol_type = other RNA
  modified_base 1: mod_base = OTHER; note = 2'-O-methoxyethyl modified nucleotide
  modified_base 2: mod_base = OTHER; note = 2'-O-methoxyethyl modified nucleotide
  modified_base 3: mod_base = OTHER; note = 2'-O-methoxyethyl modified 5-methylcytosine
  modified_base 4: mod_base = OTHER; note = 2'-O-methoxyethyl modified nucleotide
  modified_base 5: mod_base = OTHER; note = 2'-O-methoxyethyl modified 5-methylcytosine
  modified_base 6: mod_base = OTHER; note = 2'-O-methoxyethyl modified nucleotide
  modified_base 7: mod_base = OTHER; note = 2'-O-methoxyethyl modified thymine
  modified_base 8: mod_base = OTHER; note = 2'-O-methoxyethyl modified nucleotide
  modified_base 9: mod_base = OTHER; note = 2'-O-methoxyethyl modified nucleotide
  modified_base 10: mod_base = OTHER; note = 2'-O-methoxyethyl modified nucleotide
  modified_base 11: mod_base = OTHER; note = 2'-O-methoxyethyl modified nucleotide
  modified_base 12: mod_base = OTHER; note = 2'-O-methoxyethyl modified nucleotide
  modified_base 13: mod_base = OTHER; note = 2'-O-methoxyethyl modified nucleotide
  modified_base 14: mod_base = OTHER; note = 2'-O-methoxyethyl modified nucleotide
  modified_base 15: mod_base = OTHER; note = 2'-O-methoxyethyl modified nucleotide
  modified_base 16: mod_base = OTHER; note = 2'-O-methoxyethyl modified nucleotide
gacacgtgggagagag

SEQ ID NO: 107 - RNA, 16 nt, synthetic construct
  source 1..16: mol_type = other RNA
  modified_base 1: mod_base = OTHER; note = 2'-O-methoxyethyl modified 5-methylcytosine
  modified_base 2: mod_base = OTHER; note = 2'-O-methoxyethyl modified nucleotide
  modified_base 3: mod_base = OTHER; note = 2'-O-methoxyethyl modified 5-methylcytosine
  modified_base 4: mod_base = OTHER; note = 2'-O-methoxyethyl modified nucleotide
  modified_base 5: mod_base = OTHER; note = 2'-O-methoxyethyl modified thymine
  modified_base 6: mod_base = OTHER; note = 2'-O-methoxyethyl modified nucleotide
  modified_base 7: mod_base = OTHER; note = 2'-O-methoxyethyl modified nucleotide
  modified_base 8: mod_base = OTHER; note = 2'-O-methoxyethyl modified nucleotide
  modified_base 9: mod_base = OTHER; note = 2'-O-methoxyethyl modified nucleotide
  modified_base 10: mod_base = OTHER; note = 2'-O-methoxyethyl modified nucleotide
  modified_base 11: mod_base = OTHER; note = 2'-O-methoxyethyl modified nucleotide
  modified_base 12: mod_base = OTHER; note = 2'-O-methoxyethyl modified nucleotide
  modified_base 13: mod_base = OTHER; note = 2'-O-methoxyethyl modified nucleotide
  modified_base 14: mod_base = OTHER; note = 2'-O-methoxyethyl modified nucleotide
  modified_base 15: mod_base = OTHER; note = 2'-O-methoxyethyl modified nucleotide
  modified_base 16: mod_base = OTHER; note = 2'-O-methoxyethyl modified thymine
cacgtgggagagagat

SEQ ID NO: 108 - RNA, 16 nt, synthetic construct
  source 1..16: mol_type = other RNA
  modified_base 1: mod_base = OTHER; note = 2'-O-methoxyethyl modified 5-methylcytosine
  modified_base 2: mod_base = OTHER; note = 2'-O-methoxyethyl modified nucleotide
  modified_base 3: mod_base = OTHER; note = 2'-O-methoxyethyl modified thymine
  modified_base 4: mod_base = OTHER; note = 2'-O-methoxyethyl modified nucleotide
  modified_base 5: mod_base = OTHER; note = 2'-O-methoxyethyl modified nucleotide
  modified_base 6: mod_base = OTHER; note = 2'-O-methoxyethyl modified nucleotide
  modified_base 7: mod_base = OTHER; note = 2'-O-methoxyethyl modified nucleotide
  modified_base 8: mod_base = OTHER; note = 2'-O-methoxyethyl modified nucleotide
  modified_base 9: mod_base = OTHER; note = 2'-O-methoxyethyl modified nucleotide
  modified_base 10: mod_base = OTHER; note = 2'-O-methoxyethyl modified nucleotide
  modified_base 11: mod_base = OTHER; note = 2'-O-methoxyethyl modified nucleotide
  modified_base 12: mod_base = OTHER; note = 2'-O-methoxyethyl modified nucleotide
  modified_base 13: mod_base = OTHER; note = 2'-O-methoxyethyl modified nucleotide
  modified_base 14: mod_base = OTHER; note = 2'-O-methoxyethyl modified thymine
  modified_base 15: mod_base = OTHER; note = 2'-O-methoxyethyl modified nucleotide
  modified_base 16: mod_base = OTHER; note = 2'-O-methoxyethyl modified nucleotide
cgtgggagagagatgg

SEQ ID NO: 109 - RNA, 16 nt, synthetic construct
  source 1..16: mol_type = other RNA
  modified_base 1: mod_base = OTHER; note = 2'-O-methoxyethyl modified nucleotide
  modified_base 2: mod_base = OTHER; note = 2'-O-methoxyethyl modified thymine
  modified_base 3: mod_base = OTHER; note = 2'-O-methoxyethyl modified nucleotide
  modified_base 4: mod_base = OTHER; note = 2'-O-methoxyethyl modified nucleotide
  modified_base 5: mod_base = OTHER; note = 2'-O-methoxyethyl modified nucleotide
  modified_base 6: mod_base = OTHER; note = 2'-O-methoxyethyl modified nucleotide
  modified_base 7: mod_base = OTHER; note = 2'-O-methoxyethyl modified nucleotide
  modified_base 8: mod_base = OTHER; note = 2'-O-methoxyethyl modified nucleotide
  modified_base 9: mod_base = OTHER; note = 2'-O-methoxyethyl modified nucleotide
  modified_base 10: mod_base = OTHER; note = 2'-O-methoxyethyl modified nucleotide
  modified_base 11: mod_base = OTHER; note = 2'-O-methoxyethyl modified nucleotide
  modified_base 12: mod_base = OTHER; note = 2'-O-methoxyethyl modified nucleotide
  modified_base 13: mod_base = OTHER; note = 2'-O-methoxyethyl modified thymine
  modified_base 14: mod_base = OTHER; note = 2'-O-methoxyethyl modified nucleotide
  modified_base 15: mod_base = OTHER; note = 2'-O-methoxyethyl modified nucleotide
  modified_base 16: mod_base = OTHER; note = 2'-O-methoxyethyl modified nucleotide
gtgggagagagatgga

SEQ ID NO: 110 - RNA, 14 nt, synthetic construct
  source 1..14: mol_type = other RNA
  modified_base 1: mod_base = OTHER; note = 2'-O-methoxyethyl modified nucleotide
  modified_base 2: mod_base = OTHER; note = 2'-O-methoxyethyl modified nucleotide
  modified_base 3: mod_base = OTHER; note = 2'-O-methoxyethyl modified nucleotide
  modified_base 4: mod_base = OTHER; note = 2'-O-methoxyethyl modified nucleotide
  modified_base 5: mod_base = OTHER; note = 2'-O-methoxyethyl modified 5-methylcytosine
  modified_base 6: mod_base = OTHER; note = 2'-O-methoxyethyl modified nucleotide
  modified_base 7: mod_base = OTHER; note = 2'-O-methoxyethyl modified 5-methylcytosine
  modified_base 8: mod_base = OTHER; note = 2'-O-methoxyethyl modified nucleotide
  modified_base 9: mod_base = OTHER; note = 2'-O-methoxyethyl modified thymine
  modified_base 10: mod_base = OTHER; note = 2'-O-methoxyethyl modified nucleotide
  modified_base 11: mod_base = OTHER; note = 2'-O-methoxyethyl modified nucleotide
  modified_base 12: mod_base = OTHER; note = 2'-O-methoxyethyl modified nucleotide
  modified_base 13: mod_base = OTHER; note = 2'-O-methoxyethyl modified nucleotide
  modified_base 14: mod_base = OTHER; note = 2'-O-methoxyethyl modified nucleotide
gagacacgtgggag

SEQ ID NO: 111 - RNA, 14 nt, synthetic construct
  source 1..14: mol_type = other RNA
  modified_base 1: mod_base = OTHER; note = 2'-O-methoxyethyl modified nucleotide
  modified_base 2: mod_base = OTHER; note = 2'-O-methoxyethyl modified nucleotide
  modified_base 3: mod_base = OTHER; note = 2'-O-methoxyethyl modified 5-methylcytosine
  modified_base 4: mod_base = OTHER; note = 2'-O-methoxyethyl modified nucleotide
  modified_base 5: mod_base = OTHER; note = 2'-O-methoxyethyl modified 5-methylcytosine
  modified_base 6: mod_base = OTHER; note = 2'-O-methoxyethyl modified nucleotide
  modified_base 7: mod_base = OTHER; note = 2'-O-methoxyethyl modified thymine
  modified_base 8: mod_base = OTHER; note = 2'-O-methoxyethyl modified nucleotide
  modified_base 9: mod_base = OTHER; note = 2'-O-methoxyethyl modified nucleotide
  modified_base 10: mod_base = OTHER; note = 2'-O-methoxyethyl modified nucleotide
  modified_base 11: mod_base = OTHER; note = 2'-O-methoxyethyl modified nucleotide
  modified_base 12: mod_base = OTHER; note = 2'-O-methoxyethyl modified nucleotide
  modified_base 13: mod_base = OTHER; note = 2'-O-methoxyethyl modified nucleotide
  modified_base 14: mod_base = OTHER; note = 2'-O-methoxyethyl modified nucleotide
gacacgtgggagag

SEQ ID NO: 112 - RNA, 14 nt, synthetic construct
  source 1..14: mol_type = other RNA
  modified_base 1: mod_base = OTHER; note = 2'-O-methoxyethyl modified 5-methylcytosine
  modified_base 2: mod_base = OTHER; note = 2'-O-methoxyethyl modified nucleotide
  modified_base 3: mod_base = OTHER; note = 2'-O-methoxyethyl modified 5-methylcytosine
  modified_base 4: mod_base = OTHER; note = 2'-O-methoxyethyl modified nucleotide
  modified_base 5: mod_base = OTHER; note = 2'-O-methoxyethyl modified thymine
  modified_base 6: mod_base = OTHER; note = 2'-O-methoxyethyl modified nucleotide
  modified_base 7: mod_base = OTHER; note = 2'-O-methoxyethyl modified nucleotide
  modified_base 8: mod_base = OTHER; note = 2'-O-methoxyethyl modified nucleotide
  modified_base 9: mod_base = OTHER; note = 2'-O-methoxyethyl modified nucleotide
  modified_base 10: mod_base = OTHER; note = 2'-O-methoxyethyl modified nucleotide
  modified_base 11: mod_base = OTHER; note = 2'-O-methoxyethyl modified nucleotide
  modified_base 12: mod_base = OTHER; note = 2'-O-methoxyethyl modified nucleotide
  modified_base 13: mod_base = OTHER; note = 2'-O-methoxyethyl modified nucleotide
  modified_base 14: mod_base = OTHER; note = 2'-O-methoxyethyl modified nucleotide
cacgtgggagagag

SEQ ID NO: 113 - RNA, 14 nt, synthetic construct
  source 1..14: mol_type = other RNA
  modified_base 1: mod_base = OTHER; note = 2'-O-methoxyethyl modified 5-methylcytosine
  modified_base 2: mod_base = OTHER; note = 2'-O-methoxyethyl modified nucleotide
  modified_base 3: mod_base = OTHER; note = 2'-O-methoxyethyl modified thymine
  modified_base 4: mod_base = OTHER; note = 2'-O-methoxyethyl modified nucleotide
  modified_base 5: mod_base = OTHER; note = 2'-O-methoxyethyl modified nucleotide
  modified_base 6: mod_base = OTHER; note = 2'-O-methoxyethyl modified nucleotide
  modified_base 7: mod_base = OTHER; note = 2'-O-methoxyethyl modified nucleotide
  modified_base 8: mod_base = OTHER; note = 2'-O-methoxyethyl modified nucleotide
  modified_base 9: mod_base = OTHER; note = 2'-O-methoxyethyl modified nucleotide
  modified_base 10: mod_base = OTHER; note = 2'-O-methoxyethyl modified nucleotide
  modified_base 11: mod_base = OTHER; note = 2'-O-methoxyethyl modified nucleotide
  modified_base 12: mod_base = OTHER; note = 2'-O-methoxyethyl modified nucleotide
  modified_base 13: mod_base = OTHER; note = 2'-O-methoxyethyl modified nucleotide
  modified_base 14: mod_base = OTHER; note = 2'-O-methoxyethyl modified thymine
cgtgggagagagat

SEQ ID NO: 114 - RNA, 14 nt, synthetic construct
  source 1..14: mol_type = other RNA
  modified_base 1: mod_base = OTHER; note = 2'-O-methoxyethyl modified thymine
  modified_base 2: mod_base = OTHER; note = 2'-O-methoxyethyl modified nucleotide
  modified_base 3: mod_base = OTHER; note = 2'-O-methoxyethyl modified nucleotide
  modified_base 4: mod_base = OTHER; note = 2'-O-methoxyethyl modified nucleotide
  modified_base 5: mod_base = OTHER; note = 2'-O-methoxyethyl modified nucleotide
  modified_base 6: mod_base = OTHER; note = 2'-O-methoxyethyl modified nucleotide
  modified_base 7: mod_base = OTHER; note = 2'-O-methoxyethyl modified nucleotide
  modified_base 8: mod_base = OTHER; note = 2'-O-methoxyethyl modified nucleotide
  modified_base 9: mod_base = OTHER; note = 2'-O-methoxyethyl modified nucleotide
  modified_base 10: mod_base = OTHER; note = 2'-O-methoxyethyl modified nucleotide
  modified_base 11: mod_base = OTHER; note = 2'-O-methoxyethyl modified nucleotide
  modified_base 12: mod_base = OTHER; note = 2'-O-methoxyethyl modified thymine
  modified_base 13: mod_base = OTHER; note = 2'-O-methoxyethyl modified nucleotide
  modified_base 14: mod_base = OTHER; note = 2'-O-methoxyethyl modified nucleotide
tgggagagagatgg

SEQ ID NO: 115 - RNA, 14 nt, synthetic construct
  source 1..14: mol_type = other RNA
  modified_base 1: mod_base = OTHER; note = 2'-O-methoxyethyl modified nucleotide
  modified_base 2: mod_base = OTHER; note = 2'-O-methoxyethyl modified nucleotide
  modified_base 3: mod_base = OTHER; note = 2'-O-methoxyethyl modified nucleotide
  modified_base 4: mod_base = OTHER; note = 2'-O-methoxyethyl modified nucleotide
  modified_base 5: mod_base = OTHER; note = 2'-O-methoxyethyl modified nucleotide
  modified_base 6: mod_base = OTHER; note = 2'-O-methoxyethyl modified nucleotide
  modified_base 7: mod_base = OTHER; note = 2'-O-methoxyethyl modified nucleotide
  modified_base 8: mod_base = OTHER; note = 2'-O-methoxyethyl modified nucleotide
  modified_base 9: mod_base = OTHER; note = 2'-O-methoxyethyl modified nucleotide
  modified_base 10: mod_base = OTHER; note = 2'-O-methoxyethyl modified nucleotide
  modified_base 11: mod_base = OTHER; note = 2'-O-methoxyethyl modified thymine
  modified_base 12: mod_base = OTHER; note = 2'-O-methoxyethyl modified nucleotide
  modified_base 13: mod_base = OTHER; note = 2'-O-methoxyethyl modified nucleotide
  modified_base 14: mod_base = OTHER; note = 2'-O-methoxyethyl modified nucleotide
gggagagagatgga

SEQ ID NO: 116 - RNA, 12 nt, synthetic construct
  source 1..12: mol_type = other RNA
  modified_base 1: mod_base = OTHER; note = 2'-O-methoxyethyl modified nucleotide
  modified_base 2: mod_base = OTHER; note = 2'-O-methoxyethyl modified nucleotide
  modified_base 3: mod_base = OTHER; note = 2'-O-methoxyethyl modified nucleotide
  modified_base 4: mod_base = OTHER; note = 2'-O-methoxyethyl modified nucleotide
  modified_base 5: mod_base = OTHER; note = 2'-O-methoxyethyl modified 5-methylcytosine
  modified_base 6: mod_base = OTHER; note = 2'-O-methoxyethyl modified nucleotide
  modified_base 7: mod_base = OTHER; note = 2'-O-methoxyethyl modified 5-methylcytosine
  modified_base 8: mod_base = OTHER; note = 2'-O-methoxyethyl modified nucleotide
  modified_base 9: mod_base = OTHER; note = 2'-O-methoxyethyl modified thymine
  modified_base 10: mod_base = OTHER; note = 2'-O-methoxyethyl modified nucleotide
  modified_base 11: mod_base = OTHER; note = 2'-O-methoxyethyl modified nucleotide
  modified_base 12: mod_base = OTHER; note = 2'-O-methoxyethyl modified nucleotide
gagacacgtggg

SEQ ID NO: 117 - RNA, 12 nt, synthetic construct
  source 1..12: mol_type = other RNA
  modified_base 1: mod_base = OTHER; note = 2'-O-methoxyethyl modified nucleotide
  modified_base 2: mod_base = OTHER; note = 2'-O-methoxyethyl modified nucleotide
  modified_base 3: mod_base = OTHER; note = 2'-O-methoxyethyl modified 5-methylcytosine
  modified_base 4: mod_base = OTHER; note = 2'-O-methoxyethyl modified nucleotide
  modified_base 5: mod_base = OTHER; note = 2'-O-methoxyethyl modified 5-methylcytosine
  modified_base 6: mod_base = OTHER; note = 2'-O-methoxyethyl modified nucleotide
  modified_base 7: mod_base = OTHER; note = 2'-O-methoxyethyl modified thymine
  modified_base 8: mod_base = OTHER; note = 2'-O-methoxyethyl modified nucleotide
  modified_base 9: mod_base = OTHER; note = 2'-O-methoxyethyl modified nucleotide
  modified_base 10: mod_base = OTHER; note = 2'-O-methoxyethyl modified nucleotide
  modified_base 11: mod_base = OTHER; note = 2'-O-methoxyethyl modified nucleotide
  modified_base 12: mod_base = OTHER; note = 2'-O-methoxyethyl modified nucleotide
gacacgtgggag

SEQ ID NO: 118 - RNA, 12 nt, synthetic construct
  source 1..12: mol_type = other RNA
  modified_base 1: mod_base = OTHER; note = 2'-O-methoxyethyl modified 5-methylcytosine
  modified_base 2: mod_base = OTHER; note = 2'-O-methoxyethyl modified nucleotide
  modified_base 3: mod_base = OTHER; note = 2'-O-methoxyethyl modified 5-methylcytosine
  modified_base 4: mod_base = OTHER; note = 2'-O-methoxyethyl modified nucleotide
  modified_base 5: mod_base = OTHER; note = 2'-O-methoxyethyl modified thymine
  modified_base 6: mod_base = OTHER; note = 2'-O-methoxyethyl modified nucleotide
  modified_base 7: mod_base = OTHER; note = 2'-O-methoxyethyl modified nucleotide
  modified_base 8: mod_base = OTHER; note = 2'-O-methoxyethyl modified nucleotide
  modified_base 9: mod_base = OTHER; note = 2'-O-methoxyethyl modified nucleotide
  modified_base 10: mod_base = OTHER; note = 2'-O-methoxyethyl modified nucleotide
  modified_base 11: mod_base = OTHER; note = 2'-O-methoxyethyl modified nucleotide
  modified_base 12: mod_base = OTHER; note = 2'-O-methoxyethyl modified nucleotide
cacgtgggagag

SEQ ID NO: 119 - RNA, 12 nt, synthetic construct
  source 1..12: mol_type = other RNA
  modified_base 1: mod_base = OTHER; note = 2'-O-methoxyethyl modified 5-methylcytosine
  modified_base 2: mod_base = OTHER; note = 2'-O-methoxyethyl modified nucleotide
  modified_base 3: mod_base = OTHER; note = 2'-O-methoxyethyl modified thymine
  modified_base 4: mod_base = OTHER; note = 2'-O-methoxyethyl modified nucleotide
  modified_base 5: mod_base = OTHER; note = 2'-O-methoxyethyl modified nucleotide
  modified_base 6: mod_base = OTHER; note = 2'-O-methoxyethyl modified nucleotide
  modified_base 7: mod_base = OTHER; note = 2'-O-methoxyethyl modified nucleotide
  modified_base 8: mod_base = OTHER; note = 2'-O-methoxyethyl modified nucleotide
  modified_base 9: mod_base = OTHER; note = 2'-O-methoxyethyl modified nucleotide
  modified_base 10: mod_base = OTHER; note = 2'-O-methoxyethyl modified nucleotide
  modified_base 11: mod_base = OTHER; note = 2'-O-methoxyethyl modified nucleotide
  modified_base 12: mod_base = OTHER; note = 2'-O-methoxyethyl modified nucleotide
cgtgggagagag

SEQ ID NO: 120 - RNA, 12 nt, synthetic construct
  source 1..12: mol_type = other RNA
  modified_base 1: mod_base = OTHER; note = 2'-O-methoxyethyl modified thymine
  modified_base 2: mod_base = OTHER; note = 2'-O-methoxyethyl modified nucleotide
  modified_base 3: mod_base = OTHER; note = 2'-O-methoxyethyl modified nucleotide
  modified_base 4: mod_base = OTHER; note = 2'-O-methoxyethyl modified nucleotide
  modified_base 5: mod_base = OTHER; note = 2'-O-methoxyethyl modified nucleotide
  modified_base 6: mod_base = OTHER; note = 2'-O-methoxyethyl modified nucleotide
  modified_base 7: mod_base = OTHER; note = 2'-O-methoxyethyl modified nucleotide
  modified_base 8: mod_base = OTHER; note = 2'-O-methoxyethyl modified nucleotide
  modified_base 9: mod_base = OTHER; note = 2'-O-methoxyethyl modified nucleotide
  modified_base 10: mod_base = OTHER; note = 2'-O-methoxyethyl modified nucleotide
  modified_base 11: mod_base = OTHER; note = 2'-O-methoxyethyl modified nucleotide
  modified_base 12: mod_base = OTHER; note = 2'-O-methoxyethyl modified thymine
tgggagagagat

SEQ ID NO: 121 - RNA, 12 nt, synthetic construct
  source 1..12: mol_type = other RNA
  modified_base 1: mod_base = OTHER; note = 2'-O-methoxyethyl modified nucleotide
  modified_base 2: mod_base = OTHER; note = 2'-O-methoxyethyl modified nucleotide
  modified_base 3: mod_base = OTHER; note = 2'-O-methoxyethyl modified nucleotide
  modified_base 4: mod_base = OTHER; note = 2'-O-methoxyethyl modified nucleotide
  modified_base 5: mod_base = OTHER; note = 2'-O-methoxyethyl modified nucleotide
  modified_base 6: mod_base = OTHER; note = 2'-O-methoxyethyl modified nucleotide
  modified_base 7: mod_base = OTHER; note = 2'-O-methoxyethyl modified nucleotide
  modified_base 8: mod_base = OTHER; note = 2'-O-methoxyethyl modified nucleotide
  modified_base 9: mod_base = OTHER; note = 2'-O-methoxyethyl modified nucleotide
  modified_base 10: mod_base = OTHER; note = 2'-O-methoxyethyl modified thymine
  modified_base 11: mod_base = OTHER; note = 2'-O-methoxyethyl modified nucleotide
  modified_base 12: mod_base = OTHER; note = 2'-O-methoxyethyl modified nucleotide
ggagagagatgg

SEQ ID NO: 122 - RNA, 12 nt, synthetic construct
  source 1..12: mol_type = other RNA
  modified_base 1: mod_base = OTHER; note = 2'-O-methoxyethyl modified nucleotide
  modified_base 2: mod_base = OTHER; note = 2'-O-methoxyethyl modified nucleotide
  modified_base 3: mod_base = OTHER; note = 2'-O-methoxyethyl modified nucleotide
  modified_base 4: mod_base = OTHER; note = 2'-O-methoxyethyl modified nucleotide
  modified_base 5: mod_base = OTHER; note = 2'-O-methoxyethyl modified nucleotide
  modified_base 6: mod_base = OTHER; note = 2'-O-methoxyethyl modified nucleotide
  modified_base 7: mod_base = OTHER; note = 2'-O-methoxyethyl modified nucleotide
  modified_base 8: mod_base = OTHER; note = 2'-O-methoxyethyl modified nucleotide
  modified_base 9: mod_base = OTHER; note = 2'-O-methoxyethyl modified thymine
  modified_base 10: mod_base = OTHER; note = 2'-O-methoxyethyl modified nucleotide
  modified_base 11: mod_base = OTHER; note = 2'-O-methoxyethyl modified nucleotide
  modified_base 12: mod_base = OTHER; note = 2'-O-methoxyethyl modified nucleotide
gagagagatgga

SEQ ID NO: 123 - RNA, 18 nt, synthetic construct
  source 1..18: mol_type = other RNA
  modified_base 1: mod_base = OTHER; note = 2'-O-methoxyethyl modified 5-methylcytosine
  modified_base 2: mod_base = OTHER; note = 2'-O-methoxyethyl modified 5-methylcytosine
  modified_base 3: mod_base = OTHER; note = 2'-O-methoxyethyl modified nucleotide
  modified_base 4: mod_base = OTHER; note = 2'-O-methoxyethyl modified nucleotide
  modified_base 5: mod_base = OTHER; note = 2'-O-methoxyethyl modified nucleotide
  modified_base 6: mod_base = OTHER; note = 2'-O-methoxyethyl modified nucleotide
  modified_base 7: mod_base = OTHER; note = 2'-O-methoxyethyl modified nucleotide
  modified_base 8: mod_base = OTHER; note = 2'-O-methoxyethyl modified nucleotide
  modified_base 9: mod_base = OTHER; note = 2'-O-methoxyethyl modified nucleotide
  modified_base 10: mod_base = OTHER; note = 2'-O-methoxyethyl modified nucleotide
  modified_base 11: mod_base = OTHER; note = 2'-O-methoxyethyl modified nucleotide
  modified_base 12: mod_base = OTHER; note = 2'-O-methoxyethyl modified 5-methylcytosine
  modified_base 13: mod_base = OTHER; note = 2'-O-methoxyethyl modified nucleotide
  modified_base 14: mod_base = OTHER; note = 2'-O-methoxyethyl modified nucleotide
  modified_base 15: mod_base = OTHER; note = 2'-O-methoxyethyl modified nucleotide
  modified_base 16: mod_base = OTHER; note = 2'-O-methoxyethyl modified nucleotide
  modified_base 17: mod_base = OTHER; note = 2'-O-methoxyethyl modified nucleotide
  modified_base 18: mod_base = OTHER; note = 2'-O-methoxyethyl modified thymine
ccagggagagacagagat

SEQ ID NO: 124 - RNA, 18 nt, synthetic construct
  source 1..18: mol_type = other RNA
  modified_base 1: mod_base = OTHER; note = 2'-O-methoxyethyl modified nucleotide
  modified_base 2: mod_base = OTHER; note = 2'-O-methoxyethyl modified 5-methylcytosine
  modified_base 3: mod_base = OTHER; note = 2'-O-methoxyethyl modified 5-methylcytosine
  modified_base 4: mod_base = OTHER; note = 2'-O-methoxyethyl modified nucleotide
  modified_base 5: mod_base = OTHER; note = 2'-O-methoxyethyl modified nucleotide
  modified_base 6: mod_base = OTHER; note = 2'-O-methoxyethyl modified nucleotide
  modified_base 7: mod_base = OTHER; note = 2'-O-methoxyethyl modified nucleotide
  modified_base 8: mod_base = OTHER; note = 2'-O-methoxyethyl modified nucleotide
  modified_base 9: mod_base = OTHER; note = 2'-O-methoxyethyl modified nucleotide
  modified_base 10: mod_base = OTHER; note = 2'-O-methoxyethyl modified nucleotide
  modified_base 11: mod_base = OTHER; note = 2'-O-methoxyethyl modified nucleotide
  modified_base 12: mod_base = OTHER; note = 2'-O-methoxyethyl modified nucleotide
  modified_base 13: mod_base = OTHER; note = 2'-O-methoxyethyl modified 5-methylcytosine
  modified_base 14: mod_base = OTHER; note = 2'-O-methoxyethyl modified nucleotide
  modified_base 15: mod_base = OTHER; note = 2'-O-methoxyethyl modified nucleotide
  modified_base 16: mod_base = OTHER; note = 2'-O-methoxyethyl modified nucleotide
  modified_base 17: mod_base = OTHER; note = 2'-O-methoxyethyl modified nucleotide
  modified_base 18: mod_base = OTHER; note = 2'-O-methoxyethyl modified nucleotide
accagggagagacagaga

SEQ ID NO: 125 - RNA, 18 nt, synthetic construct
  source 1..18: mol_type = other RNA
  modified_base 1: mod_base = OTHER; note = 2'-O-methoxyethyl modified 5-methylcytosine
  modified_base 2: mod_base = OTHER; note = 2'-O-methoxyethyl modified nucleotide
  modified_base 3: mod_base = OTHER; note = 2'-O-methoxyethyl modified 5-methylcytosine
  modified_base 4: mod_base = OTHER; note = 2'-O-methoxyethyl modified 5-methylcytosine
  modified_base 5: mod_base = OTHER; note = 2'-O-methoxyethyl modified nucleotide
  modified_base 6: mod_base = OTHER; note = 2'-O-methoxyethyl modified nucleotide
  modified_base 7: mod_base = OTHER; note = 2'-O-methoxyethyl modified nucleotide
  modified_base 8: mod_base = OTHER; note = 2'-O-methoxyethyl modified nucleotide
  modified_base 9: mod_base = OTHER; note = 2'-O-methoxyethyl modified nucleotide
  modified_base 10: mod_base = OTHER; note = 2'-O-methoxyethyl modified nucleotide
  modified_base 11: mod_base = OTHER; note = 2'-O-methoxyethyl modified nucleotide
  modified_base 12: mod_base = OTHER; note = 2'-O-methoxyethyl modified nucleotide
  modified_base 13: mod_base = OTHER; note = 2'-O-methoxyethyl modified nucleotide
  modified_base 14: mod_base = OTHER; note = 2'-O-methoxyethyl modified 5-methylcytosine
  modified_base 15: mod_base = OTHER; note = 2'-O-methoxyethyl modified nucleotide
  modified_base 16: mod_base = OTHER; note = 2'-O-methoxyethyl modified nucleotide
  modified_base 17: mod_base = OTHER; note = 2'-O-methoxyethyl modified nucleotide
  modified_base 18: mod_base = OTHER; note = 2'-O-methoxyethyl modified nucleotide
caccagggagagacagag

SEQ ID NO: 126 - RNA, 18 nt, synthetic construct
  source 1..18: mol_type = other RNA
  modified_base 1: mod_base = OTHER; note = 2'-O-methoxyethyl modified nucleotide
  modified_base 2: mod_base = OTHER; note = 2'-O-methoxyethyl modified 5-methylcytosine
  modified_base 3: mod_base = OTHER; note = 2'-O-methoxyethyl modified nucleotide
  modified_base 4: mod_base = OTHER; note = 2'-O-methoxyethyl modified 5-methylcytosine
  modified_base 5: mod_base = OTHER; note = 2'-O-methoxyethyl modified 5-methylcytosine
  modified_base 6: mod_base = OTHER; note = 2'-O-methoxyethyl modified nucleotide
  modified_base 7: mod_base = OTHER; note = 2'-O-methoxyethyl modified nucleotide
  modified_base 8: mod_base = OTHER; note = 2'-O-methoxyethyl modified nucleotide
  modified_base 9: mod_base = OTHER; note = 2'-O-methoxyethyl modified nucleotide
  modified_base 10: mod_base = OTHER; note = 2'-O-methoxyethyl modified nucleotide
  modified_base 11: mod_base = OTHER; note = 2'-O-methoxyethyl modified nucleotide
  modified_base 12: mod_base = OTHER; note = 2'-O-methoxyethyl modified nucleotide
  modified_base 13: mod_base = OTHER; note = 2'-O-methoxyethyl modified nucleotide
  modified_base 14: mod_base = OTHER; note = 2'-O-methoxyethyl modified nucleotide
  modified_base 15: mod_base = OTHER; note = 2'-O-methoxyethyl modified 5-methylcytosine
  modified_base 16: mod_base = OTHER; note = 2'-O-methoxyethyl modified nucleotide
  modified_base 17: mod_base = OTHER; note = 2'-O-methoxyethyl modified nucleotide
  modified_base 18: mod_base = OTHER; note = 2'-O-methoxyethyl modified nucleotide
acaccagggagagacaga

SEQ ID NO: 127 - RNA, 18 nt, synthetic construct
  source 1..18: mol_type = other RNA
  modified_base 1: mod_base = OTHER; note = 2'-O-methoxyethyl modified nucleotide
  modified_base 2: mod_base = OTHER; note = 2'-O-methoxyethyl modified nucleotide
  modified_base 3: mod_base = OTHER; note = 2'-O-methoxyethyl modified nucleotide
  modified_base 4: mod_base = OTHER; note = 2'-O-methoxyethyl modified 5-methylcytosine
  modified_base 5: mod_base = OTHER; note = 2'-O-methoxyethyl modified nucleotide
  modified_base 6: mod_base = OTHER; note = 2'-O-methoxyethyl modified 5-methylcytosine
  modified_base 7: mod_base = OTHER; note = 2'-O-methoxyethyl modified 5-methylcytosine
  modified_base 8: mod_base = OTHER; note = 2'-O-methoxyethyl modified nucleotide
  modified_base 9: mod_base = OTHER; note = 2'-O-methoxyethyl modified nucleotide
  modified_base 10: mod_base = OTHER; note = 2'-O-methoxyethyl modified nucleotide
  modified_base 11: mod_base = OTHER; note = 2'-O-methoxyethyl modified nucleotide
  modified_base 12: mod_base = OTHER; note = 2'-O-methoxyethyl modified nucleotide
  modified_base 13: mod_base = OTHER; note = 2'-O-methoxyethyl modified nucleotide
  modified_base 14: mod_base = OTHER; note = 2'-O-methoxyethyl modified nucleotide
  modified_base 15: mod_base = OTHER; note = 2'-O-methoxyethyl modified nucleotide
  modified_base 16: mod_base = OTHER; note = 2'-O-methoxyethyl modified nucleotide
  modified_base 17: mod_base = OTHER; note = 2'-O-methoxyethyl modified 5-methylcytosine
  modified_base 18: mod_base = OTHER; note = 2'-O-methoxyethyl modified nucleotide
agacaccagggagagaca

SEQ ID NO: 128 - RNA, 18 nt, synthetic construct
  source 1..18: mol_type = other RNA
  modified_base 1: mod_base = OTHER; note = 2'-O-methoxyethyl modified 5-methylcytosine
  modified_base 2: mod_base = OTHER; note = 2'-O-methoxyethyl modified nucleotide
  modified_base 3: mod_base = OTHER; note = 2'-O-methoxyethyl modified nucleotide
  modified_base 4: mod_base = OTHER; note = 2'-O-methoxyethyl modified nucleotide
  modified_base 5: mod_base = OTHER; note = 2'-O-methoxyethyl modified 5-methylcytosine
  modified_base 6: mod_base = OTHER; note = 2'-O-methoxyethyl modified nucleotide
  modified_base 7: mod_base = OTHER; note = 2'-O-methoxyethyl modified 5-methylcytosine
  modified_base 8: mod_base = OTHER; note = 2'-O-methoxyethyl modified 5-methylcytosine
  modified_base 9: mod_base = OTHER; note = 2'-O-methoxyethyl modified nucleotide
  modified_base 10: mod_base = OTHER; note = 2'-O-methoxyethyl modified nucleotide
  modified_base 11: mod_base = OTHER; note = 2'-O-methoxyethyl modified nucleotide
  modified_base 12: mod_base = OTHER; note = 2'-O-methoxyethyl modified nucleotide
  modified_base 13: mod_base = OTHER; note = 2'-O-methoxyethyl modified nucleotide
  modified_base 14: mod_base = OTHER; note = 2'-O-methoxyethyl modified nucleotide
  modified_base 15: mod_base = OTHER; note = 2'-O-methoxyethyl modified nucleotide
  modified_base 16: mod_base = OTHER; note = 2'-O-methoxyethyl modified nucleotide
  modified_base 17: mod_base = OTHER; note = 2'-O-methoxyethyl modified nucleotide
  modified_base 18: mod_base = OTHER; note = 2'-O-methoxyethyl modified 5-methylcytosine
cagacaccagggagagac

SEQ ID NO: 129 - RNA, 18 nt, synthetic construct
  source 1..18: mol_type = other RNA
  modified_base 1: mod_base = OTHER; note = 2'-O-methoxyethyl modified nucleotide
  modified_base 2: mod_base = OTHER; note = 2'-O-methoxyethyl modified 5-methylcytosine
  modified_base 3: mod_base = OTHER; note = 2'-O-methoxyethyl modified nucleotide
  modified_base 4: mod_base = OTHER; note = 2'-O-methoxyethyl modified nucleotide
  modified_base 5: mod_base = OTHER; note = 2'-O-methoxyethyl modified nucleotide
  modified_base 6: mod_base = OTHER; note = 2'-O-methoxyethyl modified 5-methylcytosine
  modified_base 7: mod_base = OTHER; note = 2'-O-methoxyethyl modified nucleotide
  modified_base 8: mod_base = OTHER; note = 2'-O-methoxyethyl modified 5-methylcytosine
  modified_base 9: mod_base = OTHER; note = 2'-O-methoxyethyl modified 5-methylcytosine
  modified_base 10: mod_base = OTHER; note = 2'-O-methoxyethyl modified nucleotide
  modified_base 11: mod_base = OTHER; note = 2'-O-methoxyethyl modified nucleotide
  modified_base 12: mod_base = OTHER; note = 2'-O-methoxyethyl modified nucleotide
  modified_base 13: mod_base = OTHER; note = 2'-O-methoxyethyl modified nucleotide
  modified_base 14: mod_base = OTHER; note = 2'-O-methoxyethyl modified nucleotide
  modified_base 15: mod_base = OTHER; note = 2'-O-methoxyethyl modified nucleotide
  modified_base 16: mod_base = OTHER; note = 2'-O-methoxyethyl modified nucleotide
  modified_base 17: mod_base = OTHER; note = 2'-O-methoxyethyl modified nucleotide
  modified_base 18: mod_base = OTHER; note = 2'-O-methoxyethyl modified nucleotide
acagacaccagggagaga

SEQ ID NO: 130 - RNA, 18 nt, synthetic construct
  source 1..18: mol_type = other RNA
  modified_base 1: mod_base = OTHER; note = 2'-O-methoxyethyl modified nucleotide
  modified_base 2: mod_base = OTHER; note = 2'-O-methoxyethyl modified nucleotide
  modified_base 3: mod_base = OTHER; note = 2'-O-methoxyethyl modified 5-methylcytosine
  modified_base 4: mod_base = OTHER; note = 2'-O-methoxyethyl modified nucleotide
  modified_base 5: mod_base = OTHER; note = 2'-O-methoxyethyl modified nucleotide
  modified_base 6: mod_base = OTHER; note = 2'-O-methoxyethyl modified nucleotide
  modified_base 7: mod_base = OTHER; note = 2'-O-methoxyethyl modified 5-methylcytosine
  modified_base 8: mod_base = OTHER; note = 2'-O-methoxyethyl modified nucleotide
  modified_base 9: mod_base = OTHER; note = 2'-O-methoxyethyl modified 5-methylcytosine
  modified_base 10: mod_base = OTHER; note = 2'-O-methoxyethyl modified 5-methylcytosine
  modified_base 11: mod_base = OTHER; note = 2'-O-methoxyethyl modified nucleotide
  modified_base 12: mod_base = OTHER; note = 2'-O-methoxyethyl modified nucleotide
  modified_base 13: mod_base = OTHER; note = 2'-O-methoxyethyl modified nucleotide
  modified_base 14: mod_base = OTHER; note = 2'-O-methoxyethyl modified nucleotide
  modified_base 15: mod_base = OTHER; note = 2'-O-methoxyethyl modified nucleotide
  modified_base 16: mod_base = OTHER; note = 2'-O-methoxyethyl modified nucleotide
  modified_base 17: mod_base = OTHER; note = 2'-O-methoxyethyl modified nucleotide
  modified_base 18: mod_base = OTHER; note = 2'-O-methoxyethyl modified nucleotide
aacagacaccagggagag

SEQ ID NO: 131 - RNA, 18 nt, synthetic construct
  source 1..18: mol_type = other RNA
  modified_base 1: mod_base = OTHER; note = 2'-O-methoxyethyl modified nucleotide
  modified_base 2: mod_base = OTHER; note = 2'-O-methoxyethyl modified nucleotide
  modified_base 3: mod_base = OTHER; note = 2'-O-methoxyethyl modified nucleotide
  modified_base 4: mod_base = OTHER; note = 2'-O-methoxyethyl modified nucleotide
  modified_base 5: mod_base = OTHER; note = 2'-O-methoxyethyl modified 5-methylcytosine
  modified_base 6: mod_base = OTHER; note = 2'-O-methoxyethyl modified nucleotide
  modified_base 7: mod_base = OTHER; note = 2'-O-methoxyethyl modified nucleotide
  modified_base 8: mod_base = OTHER; note = 2'-O-methoxyethyl modified nucleotide
  modified_base 9: mod_base = OTHER; note = 2'-O-methoxyethyl modified 5-methylcytosine
  modified_base 10: mod_base = OTHER; note = 2'-O-methoxyethyl modified nucleotide
  modified_base 11: mod_base = OTHER; note = 2'-O-methoxyethyl modified 5-methylcytosine
  modified_base 12: mod_base = OTHER; note = 2'-O-methoxyethyl modified 5-methylcytosine
  modified_base 13: mod_base = OTHER; note = 2'-O-methoxyethyl modified nucleotide
  modified_base 14: mod_base = OTHER; note = 2'-O-methoxyethyl modified nucleotide
  modified_base 15: mod_base = OTHER; note = 2'-O-methoxyethyl modified nucleotide
  modified_base 16: mod_base = OTHER; note = 2'-O-methoxyethyl modified nucleotide
  modified_base 17: mod_base = OTHER; note = 2'-O-methoxyethyl modified nucleotide
  modified_base 18: mod_base = OTHER; note = 2'-O-methoxyethyl modified nucleotide
aaaacagacaccagggag

SEQ ID NO: 132 - RNA, 18 nt, synthetic construct
  source 1..18: mol_type = other RNA
  modified_base 1: mod_base = OTHER; note = 2'-O-methoxyethyl modified nucleotide
  modified_base 2: mod_base = OTHER; note = 2'-O-methoxyethyl modified nucleotide
  modified_base 3: mod_base = OTHER; note = 2'-O-methoxyethyl modified nucleotide
  modified_base 4: mod_base = OTHER; note = 2'-O-methoxyethyl modified nucleotide
  modified_base 5: mod_base = OTHER; note = 2'-O-methoxyethyl modified nucleotide
  modified_base 6: mod_base = OTHER; note = 2'-O-methoxyethyl modified 5-methylcytosine
  modified_base 7: mod_base = OTHER; note = 2'-O-methoxyethyl modified nucleotide
  modified_base 8: mod_base = OTHER; note = 2'-O-methoxyethyl modified nucleotide
  modified_base 9: mod_base = OTHER; note = 2'-O-methoxyethyl modified nucleotide
  modified_base 10: mod_base = OTHER; note = 2'-O-methoxyethyl modified 5-methylcytosine
  modified_base 11: mod_base = OTHER; note = 2'-O-methoxyethyl modified nucleotide
  modified_base 12: mod_base = OTHER; note = 2'-O-methoxyethyl modified 5-methylcytosine
  modified_base 13: mod_base = OTHER; note = 2'-O-methoxyethyl modified 5-methylcytosine
  modified_base 14: mod_base = OTHER; note = 2'-O-methoxyethyl modified nucleotide
  modified_base 15: mod_base = OTHER; note = 2'-O-methoxyethyl modified nucleotide
  modified_base 16: mod_base = OTHER; note = 2'-O-methoxyethyl modified nucleotide
  modified_base 17: mod_base = OTHER; note = 2'-O-methoxyethyl modified nucleotide
  modified_base 18: mod_base = OTHER; note = 2'-O-methoxyethyl modified nucleotide
aaaaacagacaccaggga

SEQ ID NO: 133 - RNA, 18 nt, synthetic construct
  source 1..18: mol_type = other RNA
  modified_base 1: mod_base = OTHER; note = 2'-O-methoxyethyl modified nucleotide
  modified_base 2: mod_base = OTHER; note = 2'-O-methoxyethyl modified nucleotide
  modified_base 3: mod_base = OTHER; note = 2'-O-methoxyethyl modified nucleotide
  modified_base 4: mod_base = OTHER; note = 2'-O-methoxyethyl modified nucleotide
  modified_base 5: mod_base = OTHER; note = 2'-O-methoxyethyl modified nucleotide
  modified_base 6: mod_base = OTHER; note = 2'-O-methoxyethyl modified nucleotide
  modified_base 7: mod_base = OTHER; note = 2'-O-methoxyethyl modified 5-methylcytosine
  modified_base 8: mod_base = OTHER; note = 2'-O-methoxyethyl modified nucleotide
  modified_base 9: mod_base = OTHER; note = 2'-O-methoxyethyl modified nucleotide
  modified_base 10: mod_base = OTHER; note = 2'-O-methoxyethyl modified nucleotide
  modified_base 11: mod_base = OTHER; note = 2'-O-methoxyethyl modified 5-methylcytosine
  modified_base 12: mod_base = OTHER; note = 2'-O-methoxyethyl modified nucleotide
  modified_base 13: mod_base = OTHER; note = 2'-O-methoxyethyl modified 5-methylcytosine
  modified_base 14: mod_base = OTHER; note = 2'-O-methoxyethyl modified 5-methylcytosine
  modified_base 15: mod_base = OTHER; note = 2'-O-methoxyethyl modified nucleotide
  modified_base 16: mod_base = OTHER; note = 2'-O-methoxyethyl modified nucleotide
  modified_base 17: mod_base = OTHER; note = 2'-O-methoxyethyl modified nucleotide
  modified_base 18: mod_base = OTHER; note = 2'-O-methoxyethyl modified nucleotide
gaaaaacagacaccaggg

SEQ ID NO: 134 - RNA, 18 nt, synthetic construct
  source 1..18: mol_type = other RNA
  modified_base 1: mod_base = OTHER; note = 2'-O-methoxyethyl modified nucleotide
  modified_base 2: mod_base = OTHER; note = 2'-O-methoxyethyl modified nucleotide
  modified_base 3: mod_base = OTHER; note = 2'-O-methoxyethyl modified nucleotide
  modified_base 4: mod_base = OTHER; note = 2'-O-methoxyethyl modified nucleotide
  modified_base 5: mod_base = OTHER; note = 2'-O-methoxyethyl modified nucleotide
  modified_base 6: mod_base = OTHER; note = 2'-O-methoxyethyl modified nucleotide
  modified_base 7: mod_base = OTHER; note = 2'-O-methoxyethyl modified nucleotide
  modified_base 8: mod_base = OTHER; note = 2'-O-methoxyethyl modified 5-methylcytosine
  modified_base 9: mod_base = OTHER; note = 2'-O-methoxyethyl modified nucleotide
  modified_base 10: mod_base = OTHER; note = 2'-O-methoxyethyl modified nucleotide
  modified_base 11: mod_base = OTHER; note = 2'-O-methoxyethyl modified nucleotide
  modified_base 12: mod_base = OTHER; note = 2'-O-methoxyethyl modified 5-methylcytosine
  modified_base 13: mod_base = OTHER; note = 2'-O-methoxyethyl modified nucleotide
  modified_base 14: mod_base = OTHER; note = 2'-O-methoxyethyl modified 5-methylcytosine
  modified_base 15: mod_base = OTHER; note = 2'-O-methoxyethyl modified 5-methylcytosine
  modified_base 16: mod_base = OTHER; note = 2'-O-methoxyethyl modified nucleotide
  modified_base 17: mod_base = OTHER; note = 2'-O-methoxyethyl modified nucleotide
  modified_base 18: mod_base = OTHER; note = 2'-O-methoxyethyl modified nucleotide
agaaaaacagacaccagg

SEQ ID NO: 135 - RNA, 18 nt, synthetic construct
  source 1..18: mol_type = other RNA
  modified_base 1: mod_base = OTHER; note = 2'-O-methoxyethyl modified nucleotide
  modified_base 2: mod_base = OTHER; note = 2'-O-methoxyethyl modified nucleotide
  modified_base 3: mod_base = OTHER; note = 2'-O-methoxyethyl modified nucleotide
  modified_base 4: mod_base = OTHER; note = 2'-O-methoxyethyl modified nucleotide
  modified_base 5: mod_base = OTHER; note = 2'-O-methoxyethyl modified 5-methylcytosine
  modified_base 6: mod_base = OTHER; note = 2'-O-methoxyethyl modified nucleotide
  modified_base 7: mod_base = OTHER; note = 2'-O-methoxyethyl modified nucleotide
  modified_base 8: mod_base = OTHER; note = 2'-O-methoxyethyl modified nucleotide
  modified_base 9: mod_base = OTHER; note = 2'-O-methoxyethyl modified nucleotide
  modified_base 10: mod_base = OTHER; note = 2'-O-methoxyethyl modified nucleotide
  modified_base 11: mod_base = OTHER; note = 2'-O-methoxyethyl modified nucleotide
  modified_base 12: mod_base = OTHER; note = 2'-O-methoxyethyl modified nucleotide
  modified_base 13: mod_base = OTHER; note = 2'-O-methoxyethyl modified nucleotide
  modified_base 14: mod_base = OTHER; note = 2'-O-methoxyethyl modified nucleotide
  modified_base 15: mod_base = OTHER; note = 2'-O-methoxyethyl modified nucleotide
  modified_base 16: mod_base = OTHER; note = 2'-O-methoxyethyl modified nucleotide
  modified_base 17: mod_base = OTHER; note = 2'-O-methoxyethyl modified nucleotide
  modified_base 18: mod_base = OTHER; note = 2'-O-methoxyethyl modified nucleotide
gagacagggaaggaggga

SEQ ID NO: 136 - RNA, 18 nt, synthetic construct
  source 1..18: mol_type = other RNA
  modified_base 1: mod_base = OTHER; note = 2'-O-methoxyethyl modified nucleotide
  modified_base 2: mod_base = OTHER; note = 2'-O-methoxyethyl modified nucleotide
  modified_base 3: mod_base = OTHER; note = 2'-O-methoxyethyl modified nucleotide
  modified_base 4: mod_base = OTHER; note = 2'-O-methoxyethyl modified nucleotide
  modified_base 5: mod_base = OTHER; note = 2'-O-methoxyethyl modified nucleotide
  modified_base 6: mod_base = OTHER; note = 2'-O-methoxyethyl modified 5-methylcytosine
  modified_base 7: mod_base = OTHER; note = 2'-O-methoxyethyl modified nucleotide
  modified_base 8: mod_base = OTHER; note = 2'-O-methoxyethyl modified nucleotide
  modified_base 9: mod_base = OTHER; note = 2'-O-methoxyethyl modified nucleotide
  modified_base 10: mod_base = OTHER; note = 2'-O-methoxyethyl modified nucleotide
  modified_base 11: mod_base = OTHER; note = 2'-O-methoxyethyl modified nucleotide
  modified_base 12: mod_base = OTHER; note = 2'-O-methoxyethyl modified nucleotide
  modified_base 13: mod_base = OTHER; note = 2'-O-methoxyethyl modified nucleotide
  modified_base 14: mod_base = OTHER; note = 2'-O-methoxyethyl modified nucleotide
  modified_base 15: mod_base = OTHER; note = 2'-O-methoxyethyl modified nucleotide
  modified_base 16: mod_base = OTHER; note = 2'-O-methoxyethyl modified nucleotide
  modified_base 17: mod_base = OTHER; note = 2'-O-methoxyethyl modified nucleotide
  modified_base 18: mod_base = OTHER; note = 2'-O-methoxyethyl modified nucleotide
agagacagggaaggaggg

SEQ ID NO: 137 - RNA, 18 nt, synthetic construct
  source 1..18: mol_type = other RNA
  modified_base 1: mod_base = OTHER; note = 2'-O-methoxyethyl modified nucleotide
  modified_base 2: mod_base = OTHER; note = 2'-O-methoxyethyl modified nucleotide
  modified_base 3: mod_base = OTHER; note = 2'-O-methoxyethyl modified nucleotide
  modified_base 4: mod_base = OTHER; note = 2'-O-methoxyethyl modified nucleotide
  modified_base 5: mod_base = OTHER; note = 2'-O-methoxyethyl modified nucleotide
  modified_base 6: mod_base = OTHER; note = 2'-O-methoxyethyl modified nucleotide
  modified_base 7: mod_base = OTHER; note = 2'-O-methoxyethyl modified 5-methylcytosine
  modified_base 8: mod_base = OTHER; note = 2'-O-methoxyethyl modified nucleotide
  modified_base 9: mod_base = OTHER; note = 2'-O-methoxyethyl modified nucleotide
  modified_base 10: mod_base = OTHER; note = 2'-O-methoxyethyl modified nucleotide
  modified_base 11: mod_base = OTHER; note = 2'-O-methoxyethyl modified nucleotide
  modified_base 12: mod_base = OTHER; note = 2'-O-methoxyethyl modified nucleotide
  modified_base 13: mod_base = OTHER; note = 2'-O-methoxyethyl modified nucleotide
  modified_base 14: mod_base = OTHER; note = 2'-O-methoxyethyl modified nucleotide
  modified_base 15: mod_base = OTHER; note = 2'-O-methoxyethyl modified nucleotide
  modified_base 16: mod_base = OTHER; note = 2'-O-methoxyethyl modified nucleotide
  modified_base 17: mod_base = OTHER; note = 2'-O-methoxyethyl modified nucleotide
  modified_base 18: mod_base = OTHER; note = 2'-O-methoxyethyl modified nucleotide
gagagacagggaaggagg

SEQ ID NO: 138 - RNA, 18 nt, synthetic construct
  source 1..18: mol_type = other RNA
  modified_base 1: mod_base = OTHER; note = 2'-O-methoxyethyl modified nucleotide
  modified_base 2: mod_base = OTHER; note = 2'-O-methoxyethyl modified nucleotide
  modified_base 3: mod_base = OTHER; note = 2'-O-methoxyethyl modified nucleotide
  modified_base 4: mod_base = OTHER; note = 2'-O-methoxyethyl modified nucleotide
  modified_base 5: mod_base = OTHER; note = 2'-O-methoxyethyl modified nucleotide
  modified_base 6: mod_base = OTHER; note = 2'-O-methoxyethyl modified nucleotide
  modified_base 7: mod_base = OTHER; note = 2'-O-methoxyethyl modified nucleotide
  modified_base 8: mod_base = OTHER; note = 2'-O-methoxyethyl modified 5-methylcytosine
  modified_base 9: mod_base = OTHER; note = 2'-O-methoxyethyl modified nucleotide
  modified_base 10: mod_base = OTHER; note = 2'-O-methoxyethyl modified nucleotide
  modified_base 11: mod_base = OTHER; note = 2'-O-methoxyethyl modified nucleotide
  modified_base 12: mod_base = OTHER; note = 2'-O-methoxyethyl modified nucleotide
  modified_base 13: mod_base = OTHER; note = 2'-O-methoxyethyl modified nucleotide
  modified_base 14: mod_base = OTHER; note = 2'-O-methoxyethyl modified nucleotide
  modified_base 15: mod_base = OTHER; note = 2'-O-methoxyethyl modified nucleotide
  modified_base 16: mod_base = OTHER; note = 2'-O-methoxyethyl modified nucleotide
  modified_base 17: mod_base = OTHER; note = 2'-O-methoxyethyl modified nucleotide
  modified_base 18: mod_base = OTHER; note = 2'-O-methoxyethyl modified nucleotide
agagagacagggaaggag

SEQ ID NO: 139 - RNA, 18 nt, synthetic construct
  source 1..18: mol_type = other RNA
  modified_base 1: mod_base = OTHER; note = 2'-O-methoxyethyl modified thymine
  modified_base 2: mod_base = OTHER; note = 2'-O-methoxyethyl modified nucleotide
  modified_base 3: mod_base = OTHER; note = 2'-O-methoxyethyl modified nucleotide
  modified_base 4: mod_base = OTHER; note = 2'-O-methoxyethyl modified nucleotide
  modified_base 5: mod_base = OTHER; note = 2'-O-methoxyethyl modified nucleotide
  modified_base 6: mod_base = OTHER; note = 2'-O-methoxyethyl modified nucleotide
  modified_base 7: mod_base = OTHER; note = 2'-O-methoxyethyl modified nucleotide
  modified_base 8: mod_base = OTHER; note = 2'-O-methoxyethyl modified nucleotide
  modified_base 9: mod_base = OTHER; note = 2'-O-methoxyethyl modified nucleotide
  modified_base 10: mod_base = OTHER; note = 2'-O-methoxyethyl modified 5-methylcytosine
  modified_base 11: mod_base = OTHER; note = 2'-O-methoxyethyl modified nucleotide
  modified_base 12: mod_base = OTHER; note = 2'-O-methoxyethyl modified nucleotide
  modified_base 13: mod_base = OTHER; note = 2'-O-methoxyethyl modified nucleotide
  modified_base 14: mod_base = OTHER; note = 2'-O-methoxyethyl modified nucleotide
  modified_base 15: mod_base = OTHER; note = 2'-O-methoxyethyl modified nucleotide
  modified_base 16: mod_base = OTHER; note = 2'-O-methoxyethyl modified nucleotide
  modified_base 17: mod_base = OTHER; note = 2'-O-methoxyethyl modified nucleotide
  modified_base 18: mod_base = OTHER; note = 2'-O-methoxyethyl modified nucleotide
tgagagagacagggaagg

SEQ ID NO: 140 - RNA, 18 nt, synthetic construct
  source 1..18: mol_type = other RNA
  modified_base 1: mod_base = OTHER; note = 2'-O-methoxyethyl modified nucleotide
  modified_base 2: mod_base = OTHER; note = 2'-O-methoxyethyl modified thymine
  modified_base 3: mod_base = OTHER; note = 2'-O-methoxyethyl modified nucleotide
  modified_base 4: mod_base = OTHER; note = 2'-O-methoxyethyl modified nucleotide
  modified_base 5: mod_base = OTHER; note = 2'-O-methoxyethyl modified nucleotide
  modified_base 6: mod_base = OTHER; note = 2'-O-methoxyethyl modified nucleotide
  modified_base 7: mod_base = OTHER; note = 2'-O-methoxyethyl modified nucleotide
  modified_base 8: mod_base = OTHER; note = 2'-O-methoxyethyl modified nucleotide
  modified_base 9: mod_base = OTHER; note = 2'-O-methoxyethyl modified nucleotide
  modified_base 10: mod_base = OTHER; note = 2'-O-methoxyethyl modified nucleotide
  modified_base 11: mod_base = OTHER; note = 2'-O-methoxyethyl modified 5-methylcytosine
  modified_base 12: mod_base = OTHER; note = 2'-O-methoxyethyl modified nucleotide
  modified_base 13: mod_base = OTHER; note = 2'-O-methoxyethyl modified nucleotide
  modified_base 14: mod_base = OTHER; note = 2'-O-methoxyethyl modified nucleotide
  modified_base 15: mod_base = OTHER; note = 2'-O-methoxyethyl modified nucleotide
  modified_base 16: mod_base = OTHER; note = 2'-O-methoxyethyl modified nucleotide
  modified_base 17: mod_base = OTHER; note = 2'-O-methoxyethyl modified nucleotide
  modified_base 18: mod_base = OTHER; note = 2'-O-methoxyethyl modified nucleotide
gtgagagagacagggaag

SEQ ID NO: 141 - RNA, 18 nt, synthetic construct
  source 1..18: mol_type = other RNA
  modified_base 1: mod_base = OTHER; note = 2'-O-methoxyethyl modified nucleotide
  modified_base 2: mod_base = OTHER; note = 2'-O-methoxyethyl modified nucleotide
  modified_base 3: mod_base = OTHER; note = 2'-O-methoxyethyl modified thymine
  modified_base 4: mod_base = OTHER; note = 2'-O-methoxyethyl modified nucleotide
  modified_base 5: mod_base = OTHER; note = 2'-O-methoxyethyl modified nucleotide
  modified_base 6: mod_base = OTHER; note = 2'-O-methoxyethyl modified nucleotide
  modified_base 7: mod_base = OTHER; note = 2'-O-methoxyethyl modified nucleotide
  modified_base 8: mod_base = OTHER; note = 2'-O-methoxyethyl modified nucleotide
  modified_base 9: mod_base = OTHER; note = 2'-O-methoxyethyl modified nucleotide
  modified_base 10: mod_base = OTHER; note = 2'-O-methoxyethyl modified nucleotide
  modified_base 11: mod_base = OTHER; note = 2'-O-methoxyethyl modified nucleotide
  modified_base 12: mod_base = OTHER; note = 2'-O-methoxyethyl modified 5-methylcytosine
  modified_base 13: mod_base = OTHER; note = 2'-O-methoxyethyl modified nucleotide
  modified_base 14: mod_base = OTHER; note = 2'-O-methoxyethyl modified nucleotide
  modified_base 15: mod_base = OTHER; note = 2'-O-methoxyethyl modified nucleotide
  modified_base 16: mod_base = OTHER; note = 2'-O-methoxyethyl modified nucleotide
  modified_base 17: mod_base = OTHER; note = 2'-O-methoxyethyl modified nucleotide
  modified_base 18: mod_base = OTHER; note = 2'-O-methoxyethyl modified nucleotide
ggtgagagagacagggaa

SEQ ID NO: 142 - RNA, 18 nt, synthetic construct
  source 1..18: mol_type = other RNA
  modified_base 1: mod_base = OTHER; note = 2'-O-methoxyethyl modified nucleotide
  modified_base 2: mod_base = OTHER; note = 2'-O-methoxyethyl modified nucleotide
  modified_base 3: mod_base = OTHER; note = 2'-O-methoxyethyl modified nucleotide
  modified_base 4: mod_base = OTHER; note = 2'-O-methoxyethyl modified thymine
  modified_base 5: mod_base = OTHER; note = 2'-O-methoxyethyl modified nucleotide
  modified_base 6: mod_base = OTHER; note = 2'-O-methoxyethyl modified nucleotide
  modified_base 7: mod_base = OTHER; note = 2'-O-methoxyethyl modified nucleotide
  modified_base 8: mod_base = OTHER; note = 2'-O-methoxyethyl modified nucleotide
  modified_base 9: mod_base = OTHER; note = 2'-O-methoxyethyl modified nucleotide
  modified_base 10: mod_base = OTHER; note = 2'-O-methoxyethyl modified nucleotide
  modified_base 11: mod_base = OTHER; note = 2'-O-methoxyethyl modified nucleotide
  modified_base 12: mod_base = OTHER; note = 2'-O-methoxyethyl modified nucleotide
  modified_base 13: mod_base = OTHER; note = 2'-O-methoxyethyl modified 5-methylcytosine
  modified_base 14: mod_base = OTHER; note = 2'-O-methoxyethyl modified nucleotide
  modified_base 15: mod_base = OTHER; note = 2'-O-methoxyethyl modified nucleotide
  modified_base 16: mod_base = OTHER; note = 2'-O-methoxyethyl modified nucleotide
  modified_base 17: mod_base = OTHER; note = 2'-O-methoxyethyl modified nucleotide
  modified_base 18: mod_base = OTHER; note = 2'-O-methoxyethyl modified nucleotide
gggtgagagagacaggga

SEQ ID NO: 143 - RNA, 20 nt, synthetic construct
  source 1..20: mol_type = other RNA
  modified_base 1: mod_base = OTHER; note = 2'-O-methoxyethyl modified thymine
  modified_base 2: mod_base = OTHER; note = 2'-O-methoxyethyl modified thymine
  modified_base 3: mod_base = OTHER; note = 2'-O-methoxyethyl modified 5-methylcytosine
  modified_base 4: mod_base = OTHER; note = 2'-O-methoxyethyl modified 5-methylcytosine
  modified_base 5: mod_base = OTHER; note = 2'-O-methoxyethyl modified nucleotide
  modified_base 6: mod_base = OTHER; note = 2'-O-methoxyethyl modified nucleotide
  modified_base 7: mod_base = OTHER; note = 2'-O-methoxyethyl modified nucleotide
  modified_base 8: mod_base = OTHER; note = 2'-O-methoxyethyl modified nucleotide
  modified_base 9: mod_base = OTHER; note = 2'-O-methoxyethyl modified nucleotide
  modified_base 10: mod_base = OTHER; note = 2'-O-methoxyethyl modified nucleotide
  modified_base 11: mod_base = OTHER; note = 2'-O-methoxyethyl modified 5-methylcytosine
  modified_base 12: mod_base = OTHER; note = 2'-O-methoxyethyl modified nucleotide
  modified_base 13: mod_base = OTHER; note = 2'-O-methoxyethyl modified thymine
  modified_base 14: mod_base = OTHER; note = 2'-O-methoxyethyl modified nucleotide
  modified_base 15: mod_base = OTHER; note = 2'-O-methoxyethyl modified 5-methylcytosine
  modified_base 16: mod_base = OTHER; note = 2'-O-methoxyethyl modified thymine
  modified_base 17: mod_base = OTHER; note = 2'-O-methoxyethyl modified nucleotide
  modified_base 18: mod_base = OTHER; note = 2'-O-methoxyethyl modified nucleotide
  modified_base 19: mod_base = OTHER; note = 2'-O-methoxyethyl modified nucleotide
  modified_base 20: mod_base = OTHER; note = 2'-O-methoxyethyl modified nucleotide
ttccagggaacatgctgagg

SEQ ID NO: 144 - RNA, 16 nt, synthetic construct
  source 1..16: mol_type = other RNA
  modified_base 1: mod_base = OTHER; note = 2'-O-methoxyethyl modified nucleotide
  modified_base 2: mod_base = OTHER; note = 2'-O-methoxyethyl modified nucleotide
  modified_base 3: mod_base = OTHER; note = 2'-O-methoxyethyl modified nucleotide
  modified_base 4: mod_base = OTHER; note = 2'-O-methoxyethyl modified nucleotide
  modified_base 5: mod_base = OTHER; note = 2'-O-methoxyethyl modified nucleotide
  modified_base 6: mod_base = OTHER; note = 2'-O-methoxyethyl modified nucleotide
  modified_base 7: mod_base = OTHER; note = 2'-O-methoxyethyl modified 5-methylcytosine
  modified_base 8: mod_base = OTHER; note = 2'-O-methoxyethyl modified nucleotide
  modified_base 9: mod_base = OTHER; note = 2'-O-methoxyethyl modified thymine
  modified_base 10: mod_base = OTHER; note = 2'-O-methoxyethyl modified nucleotide
  modified_base 11: mod_base = OTHER; note = 2'-O-methoxyethyl modified 5-methylcytosine
  modified_base 12: mod_base = OTHER; note = 2'-O-methoxyethyl modified thymine
  modified_base 13: mod_base = OTHER; note = 2'-O-methoxyethyl modified nucleotide
  modified_base 14: mod_base = OTHER; note = 2'-O-methoxyethyl modified nucleotide
  modified_base 15: mod_base = OTHER; note = 2'-O-methoxyethyl modified nucleotide
  modified_base 16: mod_base = OTHER; note = 2'-O-methoxyethyl modified nucleotide
agggaacatgctgagg

SEQ ID NO: 145 - RNA, 16 nt, synthetic construct
  source 1..16: mol_type = other RNA
  modified_base 1: mod_base = OTHER; note = 2'-O-methoxyethyl modified 5-methylcytosine
  modified_base 2: mod_base = OTHER; note = 2'-O-methoxyethyl modified nucleotide
  modified_base 3: mod_base = OTHER; note = 2'-O-methoxyethyl modified nucleotide
  modified_base 4: mod_base = OTHER; note = 2'-O-methoxyethyl modified nucleotide
  modified_base 5: mod_base = OTHER; note = 2'-O-methoxyethyl modified nucleotide
  modified_base 6: mod_base = OTHER; note = 2'-O-methoxyethyl modified nucleotide
  modified_base 7: mod_base = OTHER; note = 2'-O-methoxyethyl modified nucleotide
  modified_base 8: mod_base = OTHER; note = 2'-O-methoxyethyl modified 5-methylcytosine
  modified_base 9: mod_base = OTHER; note = 2'-O-methoxyethyl modified nucleotide
  modified_base 10: mod_base = OTHER; note = 2'-O-methoxyethyl modified thymine
  modified_base 11: mod_base = OTHER; note = 2'-O-methoxyethyl modified nucleotide
  modified_base 12: mod_base = OTHER; note = 2'-O-methoxyethyl modified 5-methylcytosine
  modified_base 13: mod_base = OTHER; note = 2'-O-methoxyethyl modified thymine
  modified_base 14: mod_base = OTHER; note = 2'-O-methoxyethyl modified nucleotide
  modified_base 15: mod_base = OTHER; note = 2'-O-methoxyethyl modified nucleotide
  modified_base 16: mod_base = OTHER; note = 2'-O-methoxyethyl modified nucleotide
cagggaacatgctgag

SEQ ID NO: 146 - RNA, 16 nt, synthetic construct
  source 1..16: mol_type = other RNA
  modified_base 1: mod_base = OTHER; note = 2'-O-methoxyethyl modified 5-methylcytosine
  modified_base 2: mod_base = OTHER; note = 2'-O-methoxyethyl modified 5-methylcytosine
  modified_base 3: mod_base = OTHER; note = 2'-O-methoxyethyl modified nucleotide
  modified_base 4: mod_base = OTHER; note = 2'-O-methoxyethyl modified nucleotide
  modified_base 5: mod_base = OTHER; note = 2'-O-methoxyethyl modified nucleotide
  modified_base 6: mod_base = OTHER; note = 2'-O-methoxyethyl modified nucleotide
  modified_base 7: mod_base = OTHER; note = 2'-O-methoxyethyl modified nucleotide
  modified_base 8: mod_base = OTHER; note = 2'-O-methoxyethyl modified nucleotide
  modified_base 9: mod_base = OTHER; note = 2'-O-methoxyethyl modified 5-methylcytosine
  modified_base 10: mod_base = OTHER; note = 2'-O-methoxyethyl modified nucleotide
  modified_base 11: mod_base = OTHER; note = 2'-O-methoxyethyl modified thymine
  modified_base 12: mod_base = OTHER; note = 2'-O-methoxyethyl modified nucleotide
  modified_base 13: mod_base = OTHER; note = 2'-O-methoxyethyl modified 5-methylcytosine
  modified_base 14: mod_base = OTHER; note = 2'-O-methoxyethyl modified thymine
  modified_base 15: mod_base = OTHER; note = 2'-O-methoxyethyl modified nucleotide
  modified_base 16: mod_base = OTHER; note = 2'-O-methoxyethyl modified nucleotide
ccagggaacatgctga

SEQ ID NO: 147 - RNA, 16 nt, synthetic construct
  source 1..16: mol_type = other RNA
  modified_base 1: mod_base = OTHER; note = 2'-O-methoxyethyl modified thymine
  modified_base 2: mod_base = OTHER; note = 2'-O-methoxyethyl modified 5-methylcytosine
  modified_base 3: mod_base = OTHER; note = 2'-O-methoxyethyl modified 5-methylcytosine
  modified_base 4: mod_base = OTHER; note = 2'-O-methoxyethyl modified nucleotide
  modified_base 5: mod_base = OTHER; note = 2'-O-methoxyethyl modified nucleotide
  modified_base 6: mod_base = OTHER; note = 2'-O-methoxyethyl modified nucleotide
  modified_base 7: mod_base = OTHER; note = 2'-O-methoxyethyl modified nucleotide
  modified_base 8: mod_base = OTHER; note = 2'-O-methoxyethyl modified nucleotide
  modified_base 9: mod_base = OTHER; note = 2'-O-methoxyethyl modified nucleotide
  modified_base 10: mod_base = OTHER; note = 2'-O-methoxyethyl modified 5-methylcytosine
  modified_base 11: mod_base = OTHER; note = 2'-O-methoxyethyl modified nucleotide
  modified_base 12: mod_base = OTHER; note = 2'-O-methoxyethyl modified thymine
  modified_base 13: mod_base = OTHER; note = 2'-O-methoxyethyl modified nucleotide
  modified_base 14: mod_base = OTHER; note = 2'-O-methoxyethyl modified 5-methylcytosine
  modified_base 15: mod_base = OTHER; note = 2'-O-methoxyethyl modified thymine
  modified_base 16: mod_base = OTHER; note = 2'-O-methoxyethyl modified nucleotide
tccagggaacatgctg

SEQ ID NO: 148 - RNA, 16 nt, synthetic construct
  source 1..16: mol_type = other RNA
  modified_base 1: mod_base = OTHER; note = 2'-O-methoxyethyl modified thymine
  modified_base 2: mod_base = OTHER; note = 2'-O-methoxyethyl modified thymine
  modified_base 3: mod_base = OTHER; note = 2'-O-methoxyethyl modified 5-methylcytosine
  modified_base 4: mod_base = OTHER; note = 2'-O-methoxyethyl modified 5-methylcytosine
  modified_base 5: mod_base = OTHER; note = 2'-O-methoxyethyl modified nucleotide
  modified_base 6: mod_base = OTHER; note = 2'-O-methoxyethyl modified nucleotide
  modified_base 7: mod_base = OTHER; note = 2'-O-methoxyethyl modified nucleotide
  modified_base 8: mod_base = OTHER; note = 2'-O-methoxyethyl modified nucleotide
  modified_base 9: mod_base = OTHER; note = 2'-O-methoxyethyl modified nucleotide
  modified_base 10: mod_base = OTHER; note = 2'-O-methoxyethyl modified nucleotide
  modified_base 11: mod_base = OTHER; note = 2'-O-methoxyethyl modified 5-methylcytosine
  modified_base 12: mod_base = OTHER; note = 2'-O-methoxyethyl modified nucleotide
  modified_base 13: mod_base = OTHER; note = 2'-O-methoxyethyl modified thymine
  modified_base 14: mod_base = OTHER; note = 2'-O-methoxyethyl modified nucleotide
  modified_base 15: mod_base = OTHER; note = 2'-O-methoxyethyl modified 5-methylcytosine
  modified_base 16: mod_base = OTHER; note = 2'-O-methoxyethyl modified thymine
ttccagggaacatgct

SEQ ID NO: 149 - RNA, 18 nt, synthetic construct
  source 1..18: mol_type = other RNA
  modified_base 1: mod_base = OTHER; note = Locked 5-methylcytosine
  modified_base 2: mod_base = OTHER; note = 2'-O-methoxyethyl modified 5-methylcytosine
  modified_base 3: mod_base = OTHER; note = 2'-O-methoxyethyl modified nucleotide
  modified_base 4: mod_base = OTHER; note = Locked nucleic acid
  modified_base 5: mod_base = OTHER; note = 2'-O-methoxyethyl modified nucleotide
  modified_base 6: mod_base = OTHER; note = 2'-O-methoxyethyl modified nucleotide
  modified_base 7: mod_base = OTHER; note = Locked nucleic acid
  modified_base 8: mod_base = OTHER; note = 2'-O-methoxyethyl modified nucleotide
  modified_base 9: mod_base = OTHER; note = 2'-O-methoxyethyl modified 5-methylcytosine
  modified_base 10: mod_base = OTHER; note = Locked nucleic acid
  modified_base 11: mod_base = OTHER; note = 2'-O-methoxyethyl modified thymine
  modified_base 12: mod_base = OTHER; note = 2'-O-methoxyethyl modified nucleotide
  modified_base 13: mod_base = OTHER; note = Locked 5-methylcytosine
  modified_base 14: mod_base = OTHER; note = 2'-O-methoxyethyl modified thymine
  modified_base 15: mod_base = OTHER; note = 2'-O-methoxyethyl modified nucleotide
  modified_base 16: mod_base = OTHER; note = Locked nucleic acid
  modified_base 17: mod_base = OTHER; note = 2'-O-methoxyethyl modified nucleotide
  modified_base 18: mod_base = OTHER; note = 2'-O-methoxyethyl modified nucleotide
ccagggaacatgctgagg

SEQ ID NO: 150 - RNA, 18 nt, synthetic construct
  source 1..18: mol_type = other RNA
  modified_base 1: mod_base = OTHER; note = Locked thymine
  modified_base 2: mod_base = OTHER; note = 2'-O-methoxyethyl modified 5-methylcytosine
  modified_base 3: mod_base = OTHER; note = 2'-O-methoxyethyl modified 5-methylcytosine
  modified_base 4: mod_base = OTHER; note = Locked nucleic acid
  modified_base 5: mod_base = OTHER; note = 2'-O-methoxyethyl modified nucleotide
  modified_base 6: mod_base = OTHER; note = 2'-O-methoxyethyl modified nucleotide
  modified_base 7: mod_base = OTHER; note = Locked nucleic acid
  modified_base 8: mod_base = OTHER; note = 2'-O-methoxyethyl modified nucleotide
  modified_base 9: mod_base = OTHER; note = 2'-O-methoxyethyl modified nucleotide
  modified_base 10: mod_base = OTHER; note = Locked 5-methylcytosine
  modified_base 11: mod_base = OTHER; note = 2'-O-methoxyethyl modified nucleotide
  modified_base 12: mod_base = OTHER; note = 2'-O-methoxyethyl modified thymine
  modified_base 13: mod_base = OTHER; note = Locked nucleic acid
  modified_base 14: mod_base = OTHER; note = 2'-O-methoxyethyl modified 5-methylcytosine
  modified_base 15: mod_base = OTHER; note = 2'-O-methoxyethyl modified thymine
  modified_base 16: mod_base = OTHER; note = Locked nucleic acid
  modified_base 17: mod_base = OTHER; note = 2'-O-methoxyethyl modified nucleotide
  modified_base 18: mod_base = OTHER; note = 2'-O-methoxyethyl modified nucleotide
tccagggaacatgctgag

SEQ ID NO: 151 - RNA, 18 nt, synthetic construct
  source 1..18: mol_type = other RNA
  modified_base 1: mod_base = OTHER; note = Locked thymine
  modified_base 2: mod_base = OTHER; note = 2'-O-methoxyethyl modified thymine
  modified_base 3: mod_base = OTHER; note = 2'-O-methoxyethyl modified 5-methylcytosine
  modified_base 4: mod_base = OTHER; note = Locked 5-methylcytosine
  modified_base 5: mod_base = OTHER; note = 2'-O-methoxyethyl modified nucleotide
  modified_base 6: mod_base = OTHER; note = 2'-O-methoxyethyl modified nucleotide
  modified_base 7: mod_base = OTHER; note = Locked nucleic acid
  modified_base 8: mod_base = OTHER; note = 2'-O-methoxyethyl modified nucleotide
  modified_base 9: mod_base = OTHER; note = 2'-O-methoxyethyl modified nucleotide
  modified_base 10: mod_base = OTHER; note = Locked nucleic acid
  modified_base 11: mod_base = OTHER; note = 2'-O-methoxyethyl modified 5-methylcytosine
  modified_base 12: mod_base = OTHER; note = 2'-O-methoxyethyl modified nucleotide
  modified_base 13: mod_base = OTHER; note = Locked thymine
  modified_base 14: mod_base = OTHER; note = 2'-O-methoxyethyl modified nucleotide
  modified_base 15: mod_base = OTHER; note = 2'-O-methoxyethyl modified 5-methylcytosine
  modified_base 16: mod_base = OTHER; note = Locked thymine
  modified_base 17: mod_base = OTHER; note = 2'-O-methoxyethyl modified nucleotide
  modified_base 18: mod_base = OTHER; note = 2'-O-methoxyethyl modified nucleotide
ttccagggaacatgctga

SEQ ID NO: 152 - RNA, 16 nt, synthetic construct
  source 1..16: mol_type = other RNA
  modified_base 1: mod_base = OTHER; note = Locked nucleic acid
  modified_base 2: mod_base = OTHER; note = 2'-O-methoxyethyl modified nucleotide
  modified_base 3: mod_base = OTHER; note = 2'-O-methoxyethyl modified nucleotide
  modified_base 4: mod_base = OTHER; note = Locked nucleic acid
  modified_base 5: mod_base = OTHER; note = 2'-O-methoxyethyl modified nucleotide
  modified_base 6: mod_base = OTHER; note = 2'-O-methoxyethyl modified nucleotide
  modified_base 7: mod_base = OTHER; note = Locked 5-methylcytosine
  modified_base 8: mod_base = OTHER; note = 2'-O-methoxyethyl modified nucleotide
  modified_base 9: mod_base = OTHER; note = 2'-O-methoxyethyl modified thymine
  modified_base 10: mod_base = OTHER; note = Locked nucleic acid
  modified_base 11: mod_base = OTHER; note = 2'-O-methoxyethyl modified 5-methylcytosine
  modified_base 12: mod_base = OTHER; note = 2'-O-methoxyethyl modified thymine
  modified_base 13: mod_base = OTHER; note = Locked nucleic acid
  modified_base 14: mod_base = OTHER; note = 2'-O-methoxyethyl modified nucleotide
  modified_base 15: mod_base = OTHER; note = 2'-O-methoxyethyl modified nucleotide
  modified_base 16: mod_base = OTHER; note = Locked nucleic acid
agggaacatgctgagg

SEQ ID NO: 153 - RNA, 16 nt, synthetic construct
  source 1..16: mol_type = other RNA
  modified_base 1: mod_base = OTHER; note = Locked 5-methylcytosine
  modified_base 2: mod_base = OTHER; note = 2'-O-methoxyethyl modified nucleotide
  modified_base 3: mod_base = OTHER; note = 2'-O-methoxyethyl modified nucleotide
  modified_base 4: mod_base = OTHER; note = Locked nucleic acid
  modified_base 5: mod_base = OTHER; note = 2'-O-methoxyethyl modified nucleotide
  modified_base 6: mod_base = OTHER; note = 2'-O-methoxyethyl modified nucleotide
  modified_base 7: mod_base = OTHER; note = Locked nucleic acid
  modified_base 8: mod_base = OTHER; note = 2'-O-methoxyethyl modified 5-methylcytosine
  modified_base 9: mod_base = OTHER; note = 2'-O-methoxyethyl modified nucleotide
  modified_base 10: mod_base = OTHER; note = Locked thymine
  modified_base 11: mod_base = OTHER; note = 2'-O-methoxyethyl modified nucleotide
  modified_base 12: mod_base = OTHER; note = 2'-O-methoxyethyl modified 5-methylcytosine
  modified_base 13: mod_base = OTHER; note = Locked thymine
  modified_base 14: mod_base = OTHER; note = 2'-O-methoxyethyl modified nucleotide
  modified_base 15: mod_base = OTHER; note = 2'-O-methoxyethyl modified nucleotide
  modified_base 16: mod_base = OTHER; note = Locked nucleic acid
cagggaacatgctgag

SEQ ID NO: 154 - RNA, 16 nt, synthetic construct
  source 1..16: mol_type = other RNA
  modified_base 1: mod_base = OTHER; note = Locked 5-methylcytosine
  modified_base 2: mod_base = OTHER; note = 2'-O-methoxyethyl modified 5-methylcytosine
  modified_base 3: mod_base = OTHER; note = 2'-O-methoxyethyl modified nucleotide
  modified_base 4: mod_base = OTHER; note = Locked nucleic acid
  modified_base 5: mod_base = OTHER; note = 2'-O-methoxyethyl modified nucleotide
  modified_base 6: mod_base = OTHER; note = 2'-O-methoxyethyl modified nucleotide
  modified_base 7: mod_base = OTHER; note = Locked nucleic acid
  modified_base 8: mod_base = OTHER; note = 2'-O-methoxyethyl modified nucleotide
  modified_base 9: mod_base = OTHER; note = 2'-O-methoxyethyl modified 5-methylcytosine
  modified_base 10: mod_base = OTHER; note = Locked nucleic acid
  modified_base 11: mod_base = OTHER; note = 2'-O-methoxyethyl modified thymine
  modified_base 12: mod_base = OTHER; note = 2'-O-methoxyethyl modified nucleotide
  modified_base 13: mod_base = OTHER; note = Locked 5-methylcytosine
  modified_base 14: mod_base = OTHER; note = 2'-O-methoxyethyl modified thymine
  modified_base 15: mod_base = OTHER; note = 2'-O-methoxyethyl modified nucleotide
  modified_base 16: mod_base = OTHER; note = Locked nucleic acid
ccagggaacatgctga

SEQ ID NO: 155 - RNA, 16 nt, synthetic construct
  source 1..16: mol_type = other RNA
  modified_base 1: mod_base = OTHER; note = Locked thymine
  modified_base 2: mod_base = OTHER; note = 2'-O-methoxyethyl modified 5-methylcytosine
  modified_base 3: mod_base = OTHER; note = 2'-O-methoxyethyl modified 5-methylcytosine
  modified_base 4: mod_base = OTHER; note = Locked nucleic acid
  modified_base 5: mod_base = OTHER; note = 2'-O-methoxyethyl modified nucleotide
  modified_base 6: mod_base = OTHER; note = 2'-O-methoxyethyl modified nucleotide
  modified_base 7: mod_base = OTHER; note = Locked nucleic acid
  modified_base 8: mod_base = OTHER; note = 2'-O-methoxyethyl modified nucleotide
  modified_base 9: mod_base = OTHER; note = 2'-O-methoxyethyl modified nucleotide
  modified_base 10: mod_base = OTHER; note = Locked 5-methylcytosine
  modified_base 11: mod_base = OTHER; note = 2'-O-methoxyethyl modified nucleotide
  modified_base 12: mod_base = OTHER; note = 2'-O-methoxyethyl modified thymine
  modified_base 13: mod_base = OTHER; note = Locked nucleic acid
  modified_base 14: mod_base = OTHER; note = 2'-O-methoxyethyl modified 5-methylcytosine
  modified_base 15: mod_base = OTHER; note = 2'-O-methoxyethyl modified thymine
  modified_base 16: mod_base = OTHER; note = Locked nucleic acid
tccagggaacatgctg

SEQ ID NO: 156 - RNA, 16 nt, synthetic construct
  source 1..16: mol_type = other RNA
  modified_base 1: mod_base = OTHER; note = Locked thymine
  modified_base 2: mod_base = OTHER; note = 2'-O-methoxyethyl modified thymine
  modified_base 3: mod_base = OTHER; note = 2'-O-methoxyethyl modified 5-methylcytosine
  modified_base 4: mod_base = OTHER; note = Locked 5-methylcytosine
  modified_base 5: mod_base = OTHER; note = 2'-O-methoxyethyl modified nucleotide
  modified_base 6: mod_base = OTHER; note = 2'-O-methoxyethyl modified nucleotide
  modified_base 7: mod_base = OTHER; note = Locked nucleic acid
  modified_base 8: mod_base = OTHER; note = 2'-O-methoxyethyl modified nucleotide
  modified_base 9: mod_base = OTHER; note = 2'-O-methoxyethyl modified nucleotide
  modified_base 10: mod_base = OTHER; note = Locked nucleic acid
  modified_base 11: mod_base = OTHER; note = 2'-O-methoxyethyl modified 5-methylcytosine
  modified_base 12: mod_base = OTHER; note = 2'-O-methoxyethyl modified nucleotide
  modified_base 13: mod_base = OTHER; note = Locked thymine
  modified_base 14: mod_base = OTHER; note = 2'-O-methoxyethyl modified nucleotide
  modified_base 15: mod_base = OTHER; note = 2'-O-methoxyethyl modified 5-methylcytosine
  modified_base 16: mod_base = OTHER; note = Locked thymine
ttccagggaacatgct

SEQ ID NO: 157 - RNA, 18 nt, synthetic construct
  source 1..18: mol_type = other RNA
  modified_base 1: mod_base = OTHER; note = Locked 5-methylcytosine
  modified_base 2: mod_base = OTHER; note = 2'-O-methoxyethyl modified 5-methylcytosine
  modified_base 3: mod_base = OTHER; note = Locked nucleic acid
  modified_base 4: mod_base = OTHER; note = 2'-O-methoxyethyl modified nucleotide
  modified_base 5: mod_base = OTHER; note = 2'-O-methoxyethyl modified nucleotide
  modified_base 6: mod_base = OTHER; note = 2'-O-methoxyethyl modified nucleotide
  modified_base 7: mod_base = OTHER; note = Locked nucleic acid
  modified_base 8: mod_base = OTHER; note = 2'-O-methoxyethyl modified nucleotide
  modified_base 9: mod_base = OTHER; note = 2'-O-methoxyethyl modified 5-methylcytosine
  modified_base 10: mod_base = OTHER; note = Locked nucleic acid
  modified_base 11: mod_base = OTHER; note = 2'-O-methoxyethyl modified thymine
  modified_base 12: mod_base = OTHER; note = 2'-O-methoxyethyl modified nucleotide
  modified_base 13: mod_base = OTHER; note = Locked 5-methylcytosine
  modified_base 14: mod_base = OTHER; note = 2'-O-methoxyethyl modified thymine
  modified_base 15: mod_base = OTHER; note = 2'-O-methoxyethyl modified nucleotide
  modified_base 16: mod_base = OTHER; note = Locked nucleic acid
  modified_base 17: mod_base = OTHER; note = 2'-O-methoxyethyl modified nucleotide
  modified_base 18: mod_base = OTHER; note = 2'-O-methoxyethyl modified nucleotide
ccagggaacatgctgagg

SEQ ID NO: 158 - RNA, 18 nt, synthetic construct
  source 1..18: mol_type = other RNA
  modified_base 1: mod_base = OTHER; note = Locked thymine
  modified_base 2: mod_base = OTHER; note = 2'-O-methoxyethyl modified 5-methylcytosine
  modified_base 3: mod_base = OTHER; note = 2'-O-methoxyethyl modified 5-methylcytosine
  modified_base 4: mod_base = OTHER; note = Locked nucleic acid
  modified_base 5: mod_base = OTHER; note = 2'-O-methoxyethyl modified nucleotide
  modified_base 6: mod_base = OTHER; note = 2'-O-methoxyethyl modified nucleotide
  modified_base 7: mod_base = OTHER; note = Locked nucleic acid
  modified_base 8: mod_base = OTHER; note = 2'-O-methoxyethyl modified nucleotide
  modified_base 9: mod_base = OTHER; note = 2'-O-methoxyethyl modified nucleotide
  modified_base 10: mod_base = OTHER; note = 2'-O-methoxyethyl modified 5-methylcytosine
  modified_base 11: mod_base = OTHER; note = Locked nucleic acid
  modified_base 12: mod_base = OTHER; note = 2'-O-methoxyethyl modified thymine
  modified_base 13: mod_base = OTHER; note = Locked nucleic acid
  modified_base 14: mod_base = OTHER; note = 2'-O-methoxyethyl modified 5-methylcytosine
  modified_base 15: mod_base = OTHER; note = 2'-O-methoxyethyl modified thymine
  modified_base 16: mod_base = OTHER; note = Locked nucleic acid
  modified_base 17: mod_base = OTHER; note = 2'-O-methoxyethyl modified nucleotide
  modified_base 18: mod_base = OTHER; note = 2'-O-methoxyethyl modified nucleotide
tccagggaacatgctgag

SEQ ID NO: 159 - RNA, 18 nt, synthetic construct
  source 1..18: mol_type = other RNA
  modified_base 1: mod_base = OTHER; note = Locked thymine
  modified_base 2: mod_base = OTHER; note = 2'-O-methoxyethyl modified thymine
  modified_base 3: mod_base = OTHER; note = 2'-O-methoxyethyl modified 5-methylcytosine
  modified_base 4: mod_base = OTHER; note = 2'-O-methoxyethyl modified 5-methylcytosine
  modified_base 5: mod_base = OTHER; note = Locked nucleic acid
  modified_base 6: mod_base = OTHER; note = 2'-O-methoxyethyl modified nucleotide
  modified_base 7: mod_base = OTHER; note = 2'-O-methoxyethyl modified nucleotide
  modified_base 8: mod_base = OTHER; note = Locked nucleic acid
  modified_base 9: mod_base = OTHER; note = 2'-O-methoxyethyl modified nucleotide
  modified_base 10: mod_base = OTHER; note = 2'-O-methoxyethyl modified nucleotide
  modified_base 11: mod_base = OTHER; note = 2'-O-methoxyethyl modified 5-methylcytosine
  modified_base 12: mod_base = OTHER; note = Locked nucleic acid
  modified_base 13: mod_base = OTHER; note = 2'-O-methoxyethyl modified thymine
  modified_base 14: mod_base = OTHER; note = Locked nucleic acid
  modified_base 15: mod_base = OTHER; note = 2'-O-methoxyethyl modified 5-methylcytosine
  modified_base 16: mod_base = OTHER; note = 2'-O-methoxyethyl modified thymine
  modified_base 17: mod_base = OTHER; note = 2'-O-methoxyethyl modified nucleotide
  modified_base 18: mod_base = OTHER; note = Locked nucleic acid
ttccagggaacatgctga

SEQ ID NO: 160 - RNA, 16 nt, synthetic construct
  source 1..16: mol_type = other RNA
  modified_base 1: mod_base = OTHER; note = Locked nucleic acid
  modified_base 2: mod_base = OTHER; note = 2'-O-methoxyethyl modified nucleotide
  modified_base 3: mod_base = OTHER; note = 2'-O-methoxyethyl modified nucleotide
  modified_base 4: mod_base = OTHER; note = Locked nucleic acid
  modified_base 5: mod_base = OTHER; note = 2'-O-methoxyethyl modified nucleotide
  modified_base 6: mod_base = OTHER; note = Locked nucleic acid
  modified_base 7: mod_base = OTHER; note = 2'-O-methoxyethyl modified 5-methylcytosine
  modified_base 8: mod_base = OTHER; note = 2'-O-methoxyethyl modified nucleotide
  modified_base 9: mod_base = OTHER; note = 2'-O-methoxyethyl modified thymine
  modified_base 10: mod_base = OTHER; note = Locked nucleic acid
  modified_base 11: mod_base = OTHER; note = 2'-O-methoxyethyl modified 5-methylcytosine
  modified_base 12: mod_base = OTHER; note = 2'-O-methoxyethyl modified thymine
  modified_base 13: mod_base = OTHER; note = Locked nucleic acid
  modified_base 14: mod_base = OTHER; note = 2'-O-methoxyethyl modified nucleotide
  modified_base 15: mod_base = OTHER; note = 2'-O-methoxyethyl modified nucleotide
  modified_base 16: mod_base = OTHER; note = Locked nucleic acid
agggaacatgctgagg

SEQ ID NO: 161 - RNA, 16 nt, synthetic construct
  source 1..16: mol_type = other RNA
  modified_base 1: mod_base = OTHER; note = 2'-O-methoxyethyl modified 5-methylcytosine
  modified_base 2: mod_base = OTHER; note = Locked nucleic acid
  modified_base 3: mod_base = OTHER; note = 2'-O-methoxyethyl modified nucleotide
  modified_base 4: mod_base = OTHER; note = Locked nucleic acid
  modified_base 5: mod_base = OTHER; note = 2'-O-methoxyethyl modified nucleotide
  modified_base 6: mod_base = OTHER; note = 2'-O-methoxyethyl modified nucleotide
  modified_base 7: mod_base = OTHER; note = Locked nucleic acid
  modified_base 8: mod_base = OTHER; note = 2'-O-methoxyethyl modified 5-methylcytosine
  modified_base 9: mod_base = OTHER; note = 2'-O-methoxyethyl modified nucleotide
  modified_base 10: mod_base = OTHER; note = 2'-O-methoxyethyl modified thymine
  modified_base 11: mod_base = OTHER; note = Locked nucleic acid
  modified_base 12: mod_base = OTHER; note = 2'-O-methoxyethyl modified 5-methylcytosine
  modified_base 13: mod_base = OTHER; note = 2'-O-methoxyethyl modified thymine
  modified_base 14: mod_base = OTHER; note = Locked nucleic acid
  modified_base 15: mod_base = OTHER; note = 2'-O-methoxyethyl modified nucleotide
  modified_base 16: mod_base = OTHER; note = Locked nucleic acid
cagggaacatgctgag

SEQ ID NO: 162 - RNA, 16 nt, synthetic construct
  source 1..16: mol_type = other RNA
  modified_base 1: mod_base = OTHER; note = Locked 5-methylcytosine
  modified_base 2: mod_base = OTHER; note = 2'-O-methoxyethyl modified 5-methylcytosine
  modified_base 3: mod_base = OTHER; note = Locked nucleic acid
  modified_base 4: mod_base = OTHER; note = 2'-O-methoxyethyl modified nucleotide
  modified_base 5: mod_base = OTHER; note = 2'-O-methoxyethyl modified nucleotide
  modified_base 6: mod_base = OTHER; note = 2'-O-methoxyethyl modified nucleotide
  modified_base 7: mod_base = OTHER; note = Locked nucleic acid
  modified_base 8: mod_base = OTHER; note = 2'-O-methoxyethyl modified nucleotide
  modified_base 9: mod_base = OTHER; note = 2'-O-methoxyethyl modified 5-methylcytosine
  modified_base 10: mod_base = OTHER; note = Locked nucleic acid
  modified_base 11: mod_base = OTHER; note = 2'-O-methoxyethyl modified thymine
  modified_base 12: mod_base = OTHER; note = 2'-O-methoxyethyl modified nucleotide
  modified_base 13: mod_base = OTHER; note = Locked 5-methylcytosine
  modified_base 14: mod_base = OTHER; note = 2'-O-methoxyethyl modified thymine
  modified_base 15: mod_base = OTHER; note = 2'-O-methoxyethyl modified nucleotide
  modified_base 16: mod_base = OTHER; note = Locked nucleic acid
ccagggaacatgctga

SEQ ID NO: 163 - RNA, 16 nt, synthetic construct
  source 1..16: mol_type = other RNA
  modified_base 1: mod_base = OTHER; note = Locked thymine
  modified_base 2: mod_base = OTHER; note = 2'-O-methoxyethyl modified 5-methylcytosine
  modified_base 3: mod_base = OTHER; note = 2'-O-methoxyethyl modified 5-methylcytosine
  modified_base 4: mod_base = OTHER; note = Locked nucleic acid
  modified_base 5: mod_base = OTHER; note = 2'-O-methoxyethyl modified nucleotide
  modified_base 6: mod_base = OTHER; note = 2'-O-methoxyethyl modified nucleotide
  modified_base 7: mod_base = OTHER; note = Locked nucleic acid
  modified_base 8: mod_base = OTHER; note = 2'-O-methoxyethyl modified nucleotide
  modified_base 9: mod_base = OTHER; note = Locked nucleic acid
  modified_base 10: mod_base = OTHER; note = 2'-O-methoxyethyl modified 5-methylcytosine
  modified_base 11: mod_base = OTHER; note = 2'-O-methoxyethyl modified nucleotide
  modified_base 12: mod_base = OTHER; note = 2'-O-methoxyethyl modified thymine
  modified_base 13: mod_base = OTHER; note = Locked nucleic acid
  modified_base 14: mod_base = OTHER; note = 2'-O-methoxyethyl modified 5-methylcytosine
  modified_base 15: mod_base = OTHER; note = 2'-O-methoxyethyl modified thymine
  modified_base 16: mod_base = OTHER; note = Locked nucleic acid
tccagggaacatgctg

SEQ ID NO: 164 - RNA, 16 nt, synthetic construct
  source 1..16: mol_type = other RNA
  modified_base 1: mod_base = OTHER; note = Locked thymine
  modified_base 2: mod_base = OTHER; note = 2'-O-methoxyethyl modified thymine
  modified_base 3: mod_base = OTHER; note = 2'-O-methoxyethyl modified 5-methylcytosine
  modified_base 4: mod_base = OTHER; note = 2'-O-methoxyethyl modified 5-methylcytosine
  modified_base 5: mod_base = OTHER; note = Locked nucleic acid
  modified_base 6: mod_base = OTHER; note = 2'-O-methoxyethyl modified nucleotide
  modified_base 7: mod_base = OTHER; note = Locked nucleic acid
  modified_base 8: mod_base = OTHER; note = 2'-O-methoxyethyl modified nucleotide
  modified_base 9: mod_base = OTHER; note = 2'-O-methoxyethyl modified nucleotide
  modified_base 10: mod_base = OTHER; note = Locked nucleic acid
  modified_base 11: mod_base = OTHER; note = 2'-O-methoxyethyl modified 5-methylcytosine
  modified_base 12: mod_base = OTHER; note = 2'-O-methoxyethyl modified nucleotide
  modified_base 13: mod_base = OTHER; note = 2'-O-methoxyethyl modified thymine
  modified_base 14: mod_base = OTHER; note = Locked nucleic acid
  modified_base 15: mod_base = OTHER; note = 2'-O-methoxyethyl modified 5-methylcytosine
  modified_base 16: mod_base = OTHER; note = Locked thymine
ttccagggaacatgct

SEQ ID NO: 165 - RNA, 20 nt, synthetic construct
  source 1..20: mol_type = other RNA
  modified_base 1: mod_base = OTHER; note = 2'-O-methoxyethyl modified 5-methylcytosine
  modified_base 2: mod_base = OTHER; note = 2'-O-methoxyethyl modified nucleotide
  modified_base 3: mod_base = OTHER; note = 2'-O-methoxyethyl modified nucleotide
  modified_base 4: mod_base = OTHER; note = 2'-O-methoxyethyl modified nucleotide
  modified_base 5: mod_base = OTHER; note = 2'-O-methoxyethyl modified 5-methylcytosine
  modified_base 6: mod_base = OTHER; note = 2'-O-methoxyethyl modified nucleotide
  modified_base 7: mod_base = OTHER; note = 2'-O-methoxyethyl modified 5-methylcytosine
  modified_base 8: mod_base = OTHER; note = 2'-O-methoxyethyl modified 5-methylcytosine
  modified_base 9: mod_base = OTHER; note = 2'-O-methoxyethyl modified nucleotide
  modified_base 10: mod_base = OTHER; note = 2'-O-methoxyethyl modified nucleotide
  modified_base 11: mod_base = OTHER; note = 2'-O-methoxyethyl modified nucleotide
  modified_base 12: mod_base = OTHER; note = 2'-O-methoxyethyl modified nucleotide
  modified_base 13: mod_base = OTHER; note = 2'-O-methoxyethyl modified nucleotide
  modified_base 14: mod_base = OTHER; note = 2'-O-methoxyethyl modified nucleotide
  modified_base 15: mod_base = OTHER; note = 2'-O-methoxyethyl modified nucleotide
  modified_base 16: mod_base = OTHER; note = 2'-O-methoxyethyl modified nucleotide
  modified_base 17: mod_base = OTHER; note = 2'-O-methoxyethyl modified nucleotide
  modified_base 18: mod_base = OTHER; note = 2'-O-methoxyethyl modified 5-methylcytosine
  modified_base 19: mod_base = OTHER; note = 2'-O-methoxyethyl modified nucleotide
  modified_base 20: mod_base = OTHER; note = 2'-O-methoxyethyl modified nucleotide
cagacaccagggagagacag

SEQ ID NO: 166 - RNA, 21 nt, synthetic construct
  source 1..21: mol_type = other RNA
  modified_base 1: mod_base = OTHER; note = 2'-O-methoxyethyl modified nucleotide
  modified_base 2: mod_base = OTHER; note = 2'-O-methoxyethyl modified 5-methylcytosine
  modified_base 3: mod_base = OTHER; note = 2'-O-methoxyethyl modified nucleotide
  modified_base 4: mod_base = OTHER; note = 2'-O-methoxyethyl modified nucleotide
  modified_base 5: mod_base = OTHER; note = 2'-O-methoxyethyl modified nucleotide
  modified_base 6: mod_base = OTHER; note = 2'-O-methoxyethyl modified 5-methylcytosine
  modified_base 7: mod_base = OTHER; note = 2'-O-methoxyethyl modified nucleotide
  modified_base 8: mod_base = OTHER; note = 2'-O-methoxyethyl modified 5-methylcytosine
  modified_base 9: mod_base = OTHER; note = 2'-O-methoxyethyl modified 5-methylcytosine
  modified_base 10: mod_base = OTHER; note = 2'-O-methoxyethyl modified nucleotide
  modified_base 11: mod_base = OTHER; note = 2'-O-methoxyethyl modified nucleotide
  modified_base 12: mod_base = OTHER; note = 2'-O-methoxyethyl modified nucleotide
  modified_base 13: mod_base = OTHER; note = 2'-O-methoxyethyl modified nucleotide
  modified_base 14: mod_base = OTHER; note = 2'-O-methoxyethyl modified nucleotide
  modified_base 15: mod_base = OTHER; note = 2'-O-methoxyethyl modified nucleotide
  modified_base 16: mod_base = OTHER; note = 2'-O-methoxyethyl modified nucleotide
  modified_base 17: mod_base = OTHER; note = 2'-O-methoxyethyl modified nucleotide
  modified_base 18: mod_base = OTHER; note = 2'-O-methoxyethyl modified nucleotide
  modified_base 19: mod_base = OTHER; note = 2'-O-methoxyethyl modified 5-methylcytosine
  modified_base 20: mod_base = OTHER; note = 2'-O-methoxyethyl modified nucleotide
  modified_base 21: mod_base = OTHER; note = 2'-O-methoxyethyl modified nucleotide
acagacaccagggagagacag

SEQ ID NO: 167 - RNA, 22 nt, synthetic construct
  source 1..22: mol_type = other RNA
  modified_base 1: mod_base = OTHER; note = 2'-O-methoxyethyl modified nucleotide
  modified_base 2: mod_base = OTHER; note = 2'-O-methoxyethyl modified nucleotide
  modified_base 3: mod_base = OTHER; note = 2'-O-methoxyethyl modified 5-methylcytosine
  modified_base 4: mod_base = OTHER; note = 2'-O-methoxyethyl modified nucleotide
  modified_base 5: mod_base = OTHER; note = 2'-O-methoxyethyl modified nucleotide
  modified_base 6: mod_base = OTHER; note = 2'-O-methoxyethyl modified nucleotide
  modified_base 7: mod_base = OTHER; note = 2'-O-methoxyethyl modified 5-methylcytosine
  modified_base 8: mod_base = OTHER; note = 2'-O-methoxyethyl modified nucleotide
  modified_base 9: mod_base = OTHER; note = 2'-O-methoxyethyl modified 5-methylcytosine
  modified_base 10: mod_base = OTHER; note = 2'-O-methoxyethyl modified 5-methylcytosine
  modified_base 11: mod_base = OTHER; note = 2'-O-methoxyethyl modified nucleotide
  modified_base 12: mod_base = OTHER; note = 2'-O-methoxyethyl modified nucleotide
  modified_base 13: mod_base = OTHER; note = 2'-O-methoxyethyl modified nucleotide
  modified_base 14: mod_base = OTHER; note = 2'-O-methoxyethyl modified nucleotide
  modified_base 15: mod_base = OTHER; note = 2'-O-methoxyethyl modified nucleotide
  modified_base 16: mod_base = OTHER; note = 2'-O-methoxyethyl modified nucleotide
  modified_base 17: mod_base = OTHER; note = 2'-O-methoxyethyl modified nucleotide
  modified_base 18: mod_base = OTHER; note = 2'-O-methoxyethyl modified nucleotide
  modified_base 19: mod_base = OTHER; note = 2'-O-methoxyethyl modified nucleotide
  modified_base 20: mod_base = OTHER; note = 2'-O-methoxyethyl modified 5-methylcytosine
  modified_base 21: mod_base = OTHER; note = 2'-O-methoxyethyl modified nucleotide
  modified_base 22: mod_base = OTHER; note = 2'-O-methoxyethyl modified nucleotide
aacagacaccagggagagacag

SEQ ID NO: 168 - RNA, 23 nt, synthetic construct
  source 1..23: mol_type = other RNA
  modified_base 1: mod_base = OTHER; note = 2'-O-methoxyethyl modified nucleotide
  modified_base 2: mod_base = OTHER; note = 2'-O-methoxyethyl modified nucleotide
  modified_base 3: mod_base = OTHER; note = 2'-O-methoxyethyl modified nucleotide
  modified_base 4: mod_base = OTHER; note = 2'-O-methoxyethyl modified 5-methylcytosine
  modified_base 5: mod_base = OTHER; note = 2'-O-methoxyethyl modified nucleotide
  modified_base 6: mod_base = OTHER; note = 2'-O-methoxyethyl modified nucleotide
  modified_base 7: mod_base = OTHER; note = 2'-O-methoxyethyl modified nucleotide
  modified_base 8: mod_base = OTHER; note = 2'-O-methoxyethyl modified 5-methylcytosine
  modified_base 9: mod_base = OTHER; note = 2'-O-methoxyethyl modified nucleotide
  modified_base 10: mod_base = OTHER; note = 2'-O-methoxyethyl modified 5-methylcytosine
  modified_base 11: mod_base = OTHER; note = 2'-O-methoxyethyl modified 5-methylcytosine
  modified_base 12: mod_base = OTHER; note = 2'-O-methoxyethyl modified nucleotide
  modified_base 13: mod_base = OTHER; note = 2'-O-methoxyethyl modified nucleotide
  modified_base 14: mod_base = OTHER; note = 2'-O-methoxyethyl modified nucleotide
  modified_base 15: mod_base = OTHER; note = 2'-O-methoxyethyl modified nucleotide
  modified_base 16: mod_base = OTHER; note = 2'-O-methoxyethyl modified nucleotide
  modified_base 17: mod_base = OTHER; note = 2'-O-methoxyethyl modified nucleotide
  modified_base 18: mod_base = OTHER; note = 2'-O-methoxyethyl modified nucleotide
  modified_base 19: mod_base = OTHER; note = 2'-O-methoxyethyl modified nucleotide
  modified_base 20: mod_base = OTHER; note = 2'-O-methoxyethyl modified nucleotide
  modified_base 21: mod_base = OTHER; note = 2'-O-methoxyethyl modified 5-methylcytosine
  modified_base 22: mod_base = OTHER; note = 2'-O-methoxyethyl modified nucleotide
  modified_base 23: mod_base = OTHER; note = 2'-O-methoxyethyl modified nucleotide
aaacagacaccagggagagacag

SEQ ID NO: 169 - RNA, 20 nt, synthetic construct
  source 1..20: mol_type = other RNA
  modified_base 1: mod_base = OTHER; note = 2'-O-methoxyethyl modified nucleotide
  modified_base 2: mod_base = OTHER; note = 2'-O-methoxyethyl modified nucleotide
  modified_base 3: mod_base = OTHER; note = 2'-O-methoxyethyl modified nucleotide
  modified_base 4: mod_base = OTHER; note = 2'-O-methoxyethyl modified nucleotide
  modified_base 5: mod_base = OTHER; note = 2'-O-methoxyethyl modified nucleotide
  modified_base 6: mod_base = OTHER; note = 2'-O-methoxyethyl modified nucleotide
  modified_base 7: mod_base = OTHER; note = 2'-O-methoxyethyl modified nucleotide
  modified_base 8: mod_base = OTHER; note = 2'-O-methoxyethyl modified nucleotide
  modified_base 9: mod_base = OTHER; note = 2'-O-methoxyethyl modified nucleotide
  modified_base 10: mod_base = OTHER; note = 2'-O-methoxyethyl modified nucleotide
  modified_base 11: mod_base = OTHER; note = 2'-O-methoxyethyl modified nucleotide
  modified_base 12: mod_base = OTHER; note = 2'-O-methoxyethyl modified nucleotide
  modified_base 13: mod_base = OTHER; note = 2'-O-methoxyethyl modified nucleotide
  modified_base 14: mod_base = OTHER; note = 2'-O-methoxyethyl modified nucleotide
  modified_base 15: mod_base = OTHER; note = 2'-O-methoxyethyl modified nucleotide
  modified_base 16: mod_base = OTHER; note = 2'-O-methoxyethyl modified nucleotide
  modified_base 17: mod_base = OTHER; note = 2'-O-methoxyethyl modified nucleotide
  modified_base 18: mod_base = OTHER; note = 2'-O-methoxyethyl modified nucleotide
  modified_base 19: mod_base = OTHER; note = 2'-O-methoxyethyl modified nucleotide
  modified_base 20: mod_base = OTHER; note = 2'-O-methoxyethyl modified nucleotide
cagacaccagggagagacag

SEQ ID NO: 170 - RNA, 21 nt, synthetic construct
  source 1..21: mol_type = other RNA
  modified_base 1: mod_base = OTHER; note = 2'-O-methoxyethyl modified nucleotide
  modified_base 2: mod_base = OTHER; note = 2'-O-methoxyethyl modified nucleotide
  modified_base 3: mod_base = OTHER; note = 2'-O-methoxyethyl modified nucleotide
  modified_base 4: mod_base = OTHER; note = 2'-O-methoxyethyl modified nucleotide
  modified_base 5: mod_base = OTHER; note = 2'-O-methoxyethyl modified nucleotide
  modified_base 6: mod_base = OTHER; note = 2'-O-methoxyethyl modified nucleotide
  modified_base 7: mod_base = OTHER; note = 2'-O-methoxyethyl modified nucleotide
  modified_base 8: mod_base = OTHER; note = 2'-O-methoxyethyl modified nucleotide
  modified_base 9: mod_base = OTHER; note = 2'-O-methoxyethyl modified nucleotide
  modified_base 10: mod_base = OTHER; note = 2'-O-methoxyethyl modified nucleotide
  modified_base 11: mod_base = OTHER; note = 2'-O-methoxyethyl modified nucleotide
  modified_base 12: mod_base = OTHER; note = 2'-O-methoxyethyl modified nucleotide
  modified_base 13: mod_base = OTHER; note = 2'-O-methoxyethyl modified nucleotide
  modified_base 14: mod_base = OTHER; note = 2'-O-methoxyethyl modified nucleotide
  modified_base 15: mod_base = OTHER; note = 2'-O-methoxyethyl modified nucleotide
  modified_base 16: mod_base = OTHER; note = 2'-O-methoxyethyl modified nucleotide
  modified_base 17: mod_base = OTHER; note = 2'-O-methoxyethyl modified nucleotide
  modified_base 18: mod_base = OTHER; note = 2'-O-methoxyethyl modified nucleotide
  modified_base 19: mod_base = OTHER; note = 2'-O-methoxyethyl modified nucleotide
  modified_base 20: mod_base = OTHER; note = 2'-O-methoxyethyl modified nucleotide
  modified_base 21: mod_base = OTHER; note = 2'-O-methoxyethyl modified nucleotide
acagacaccagggagagacag

SEQ ID NO: 171 - RNA, 22 nt, synthetic construct
  source 1..22: mol_type = other RNA
  modified_base 1: mod_base = OTHER; note = 2'-O-methoxyethyl modified nucleotide
  modified_base 2: mod_base = OTHER; note = 2'-O-methoxyethyl modified nucleotide
  modified_base 3: mod_base = OTHER; note = 2'-O-methoxyethyl modified nucleotide
  modified_base 4: mod_base = OTHER; note = 2'-O-methoxyethyl modified nucleotide
  modified_base 5: mod_base = OTHER; note = 2'-O-methoxyethyl modified nucleotide
  modified_base 6: mod_base = OTHER; note = 2'-O-methoxyethyl modified nucleotide
  modified_base 7: mod_base = OTHER; note = 2'-O-methoxyethyl modified nucleotide
  modified_base 8: mod_base = OTHER; note = 2'-O-methoxyethyl modified nucleotide
  modified_base 9: mod_base = OTHER; note = 2'-O-methoxyethyl modified nucleotide
  modified_base 10: mod_base = OTHER; note = 2'-O-methoxyethyl modified nucleotide
  modified_base 11: mod_base = OTHER; note = 2'-O-methoxyethyl modified nucleotide
  modified_base 12: mod_base = OTHER; note = 2'-O-methoxyethyl modified nucleotide
  modified_base 13: mod_base = OTHER; note = 2'-O-methoxyethyl modified nucleotide
  modified_base 14: mod_base = OTHER; note = 2'-O-methoxyethyl modified nucleotide
  modified_base 15: mod_base = OTHER; note = 2'-O-methoxyethyl modified nucleotide
  modified_base 16: mod_base = OTHER; note = 2'-O-methoxyethyl modified nucleotide
  modified_base 17: mod_base = OTHER; note = 2'-O-methoxyethyl modified nucleotide
  modified_base 18: mod_base = OTHER; note = 2'-O-methoxyethyl modified nucleotide
  modified_base 19: mod_base = OTHER; note = 2'-O-methoxyethyl modified nucleotide
  modified_base 20: mod_base = OTHER; note = 2'-O-methoxyethyl modified nucleotide
  modified_base 21: mod_base = OTHER; note = 2'-O-methoxyethyl modified nucleotide
  modified_base 22: mod_base = OTHER; note = 2'-O-methoxyethyl modified nucleotide
aacagacaccagggagagacag

SEQ ID NO: 172 - RNA, 23 nt, synthetic construct
  source 1..23: mol_type = other RNA
  modified_base 1: mod_base = OTHER; note = 2'-O-methoxyethyl modified nucleotide
  modified_base 2: mod_base = OTHER; note = 2'-O-methoxyethyl modified nucleotide
  modified_base 3: mod_base = OTHER; note = 2'-O-methoxyethyl modified nucleotide
  modified_base 4: mod_base = OTHER; note = 2'-O-methoxyethyl modified nucleotide
  modified_base 5: mod_base = OTHER; note = 2'-O-methoxyethyl modified nucleotide
  modified_base 6: mod_base = OTHER; note = 2'-O-methoxyethyl modified nucleotide
  modified_base 7: mod_base = OTHER; note = 2'-O-methoxyethyl modified nucleotide
  modified_base 8: mod_base = OTHER; note = 2'-O-methoxyethyl modified nucleotide
  modified_base 9: mod_base = OTHER; note = 2'-O-methoxyethyl modified nucleotide
  modified_base 10: mod_base = OTHER; note = 2'-O-methoxyethyl modified nucleotide
  modified_base 11: mod_base = OTHER; note = 2'-O-methoxyethyl modified nucleotide
  modified_base 12: mod_base = OTHER; note = 2'-O-methoxyethyl modified nucleotide
  modified_base 13: mod_base = OTHER; note = 2'-O-methoxyethyl modified nucleotide
  modified_base 14: mod_base = OTHER; note = 2'-O-methoxyethyl modified nucleotide
  modified_base 15: mod_base = OTHER; note = 2'-O-methoxyethyl modified nucleotide
  modified_base 16: mod_base = OTHER; note = 2'-O-methoxyethyl modified nucleotide
  modified_base 17: mod_base = OTHER; note = 2'-O-methoxyethyl modified nucleotide
  modified_base 18: mod_base = OTHER; note = 2'-O-methoxyethyl modified nucleotide
  modified_base 19: mod_base = OTHER; note = 2'-O-methoxyethyl modified nucleotide
  modified_base 20: mod_base = OTHER; note = 2'-O-methoxyethyl modified nucleotide
  modified_base 21: mod_base = OTHER; note = 2'-O-methoxyethyl modified nucleotide
  modified_base 22: mod_base = OTHER; note = 2'-O-methoxyethyl modified nucleotide
  modified_base 23: mod_base = OTHER; note = 2'-O-methoxyethyl modified nucleotide
aaacagacaccagggagagacag

SEQ ID NO: 173 - DNA, 18 bp, synthetic construct
  source 1..18: mol_type = other DNA
ggaggggtgtgggagaga

SEQ ID NO: 174 - DNA, 18 bp, synthetic construct
  source 1..18: mol_type = other DNA
gagatggaggggtgtggg

SEQ ID NO: 175 - DNA, 18 bp, synthetic construct
  source 1..18: mol_type = other DNA
ggagagagatggaggggt

SEQ ID NO: 176 - DNA, 18 bp, synthetic construct
  source 1..18: mol_type = other DNA
ggggagagacacgtggga

SEQ ID NO: 177 - DNA, 18 bp, synthetic construct
  source 1..18: mol_type = other DNA
ggtgaggggagagacacg

SEQ ID NO: 178 - DNA, 18 bp, synthetic construct
  source 1..18: mol_type = other DNA
gagaaggtgaggggagag

SEQ ID NO: 179 - DNA, 18 bp, synthetic construct
  source 1..18: mol_type = other DNA
ggggagagaaggtgaggg

SEQ ID NO: 180 - DNA, 18 bp, synthetic construct
  source 1..18: mol_type = other DNA
tggagggggagagaaggt

SEQ ID NO: 181 - DNA, 18 bp, synthetic construct
  source 1..18: mol_type = other DNA
agaaatggagggggagag

SEQ ID NO: 182 - DNA, 18 bp, synthetic construct
  source 1..18: mol_type = other DNA
gagagagaaatggagggg

SEQ ID NO: 183 - DNA, 18 bp, synthetic construct
  source 1..18: mol_type = other DNA
aagggggccatggcagag

SEQ ID NO: 184 - DNA, 18 bp, synthetic construct
  source 1..18: mol_type = other DNA
tgaagaagggggccatgg

SEQ ID NO: 185 - DNA, 18 bp, synthetic construct
  source 1..18: mol_type = other DNA
ctgcttgaagaagggggc

SEQ ID NO: 186 - DNA, 18 bp, synthetic construct
  source 1..18: mol_type = other DNA
ggggtgagagagacaggg

SEQ ID NO: 187 - DNA, 18 bp, synthetic construct
  source 1..18: mol_type = other DNA
aaacaggggtgagagaga

SEQ ID NO: 188 - DNA, 18 bp, synthetic construct
  source 1..18: mol_type = other DNA
tgtggaaacaggggtgag

SEQ ID NO: 189 - DNA, 18 bp, synthetic construct
  source 1..18: mol_type = other DNA
ggggtggtaggaggtgag

SEQ ID NO: 190 - DNA, 18 bp, synthetic construct
  source 1..18: mol_type = other DNA
tgaggggggtggtaggag

SEQ ID NO: 191 - DNA, 18 bp, synthetic construct
  source 1..18: mol_type = other DNA
catgctgaggggggtggt

SEQ ID NO: 192 - DNA, 18 bp, synthetic construct
  source 1..18: mol_type = other DNA
gggaacatgctgaggggg

SEQ ID NO: 193 - DNA, 18 bp, synthetic construct
  source 1..18: mol_type = other DNA
gggagagagatggagggg

SEQ ID NO: 194 - DNA, 18 bp, synthetic construct
  source 1..18: mol_type = other DNA
agggaacatgctgagggg

SEQ ID NO: 195 - RNA, 18 nt, synthetic construct
  source 1..18: mol_type = other RNA
  modified_base 1: mod_base = OTHER; note = 2'-O-methoxyethyl modified nucleotide
  modified_base 2: mod_base = OTHER; note = 2'-O-methoxyethyl modified nucleotide
  modified_base 3: mod_base = OTHER; note = 2'-O-methoxyethyl modified nucleotide
  modified_base 4: mod_base = OTHER; note = 2'-O-methoxyethyl modified nucleotide
  modified_base 5: mod_base = OTHER; note = 2'-O-methoxyethyl modified nucleotide
  modified_base 6: mod_base = OTHER; note = 2'-O-methoxyethyl modified thymine
  modified_base 7: mod_base = OTHER; note = 2'-O-methoxyethyl modified nucleotide
  modified_base 8: mod_base = OTHER; note = 2'-O-methoxyethyl modified thymine
  modified_base 9: mod_base = OTHER; note = 2'-O-methoxyethyl modified nucleotide
  modified_base 10: mod_base = OTHER; note = 2'-O-methoxyethyl modified nucleotide
  modified_base 11: mod_base = OTHER; note = 2'-O-methoxyethyl modified nucleotide
  modified_base 12: mod_base = OTHER; note = 2'-O-methoxyethyl modified thymine
  modified_base 13: mod_base = OTHER; note = 2'-O-methoxyethyl modified nucleotide
  modified_base 14: mod_base = OTHER; note = 2'-O-methoxyethyl modified nucleotide
  modified_base 15: mod_base = OTHER; note = 2'-O-methoxyethyl modified nucleotide
  modified_base 16: mod_base = OTHER; note = 2'-O-methoxyethyl modified nucleotide
  modified_base 17: mod_base = OTHER; note = 2'-O-methoxyethyl modified nucleotide
  modified_base 18: mod_base = OTHER; note = 2'-O-methoxyethyl modified nucleotide
aggagtatgggtaggaaa

SEQ ID NO: 196 - RNA, 18 nt, synthetic construct
  source 1..18: mol_type = other RNA
  modified_base 1: mod_base = OTHER; note = 2'-O-methoxyethyl modified 5-methylcytosine
  modified_base 2: mod_base = OTHER; note = 2'-O-methoxyethyl modified nucleotide
  modified_base 3: mod_base = OTHER; note = 2'-O-methoxyethyl modified nucleotide
  modified_base 4: mod_base = OTHER; note = 2'-O-methoxyethyl modified nucleotide
  modified_base 5: mod_base = OTHER; note = 2'-O-methoxyethyl modified nucleotide
  modified_base 6: mod_base = OTHER; note = 2'-O-methoxyethyl modified nucleotide
  modified_base 7: mod_base = OTHER; note = 2'-O-methoxyethyl modified nucleotide
  modified_base 8: mod_base = OTHER; note = 2'-O-methoxyethyl modified nucleotide
  modified_base 9: mod_base = OTHER; note = 2'-O-methoxyethyl modified nucleotide
  modified_base 10: mod_base = OTHER; note = 2'-O-methoxyethyl modified nucleotide
  modified_base 11: mod_base = OTHER; note = 2'-O-methoxyethyl modified thymine
  modified_base 12: mod_base = OTHER; note = 2'-O-methoxyethyl modified nucleotide
  modified_base 13: mod_base = OTHER; note = 2'-O-methoxyethyl modified thymine
  modified_base 14: mod_base = OTHER; note = 2'-O-methoxyethyl modified nucleotide
  modified_base 15: mod_base = OTHER; note = 2'-O-methoxyethyl modified nucleotide
  modified_base 16: mod_base = OTHER; note = 2'-O-methoxyethyl modified nucleotide
  modified_base 17: mod_base = OTHER; note = 2'-O-methoxyethyl modified thymine
  modified_base 18: mod_base = OTHER; note = 2'-O-methoxyethyl modified nucleotide
caaagaggagtatgggta

SEQ ID NO: 197 - RNA, 18 nt, synthetic construct
  source 1..18: mol_type = other RNA
  modified_base 1: mod_base = OTHER; note = 2'-O-methoxyethyl modified 5-methylcytosine
  modified_base 2: mod_base = OTHER; note = 2'-O-methoxyethyl modified nucleotide
  modified_base 3: mod_base = OTHER; note = 2'-O-methoxyethyl modified nucleotide
  modified_base 4: mod_base = OTHER; note = 2'-O-methoxyethyl modified nucleotide
  modified_base 5: mod_base = OTHER; note = 2'-O-methoxyethyl modified nucleotide
  modified_base 6: mod_base = OTHER; note = 2'-O-methoxyethyl modified 5-methylcytosine
  modified_base 7: mod_base = OTHER; note = 2'-O-methoxyethyl modified nucleotide
  modified_base 8: mod_base = OTHER; note = 2'-O-methoxyethyl modified nucleotide
  modified_base 9: mod_base = OTHER; note = 2'-O-methoxyethyl modified nucleotide
  modified_base 10: mod_base = OTHER; note = 2'-O-methoxyethyl modified nucleotide
  modified_base 11: mod_base = OTHER; note = 2'-O-methoxyethyl modified nucleotide
  modified_base 12: mod_base = OTHER; note = 2'-O-methoxyethyl modified nucleotide
  modified_base 13: mod_base = OTHER; note = 2'-O-methoxyethyl modified nucleotide
  modified_base 14: mod_base = OTHER; note = 2'-O-methoxyethyl modified nucleotide
  modified_base 15: mod_base = OTHER; note = 2'-O-methoxyethyl modified nucleotide
  modified_base 16: mod_base = OTHER; note = 2'-O-methoxyethyl modified thymine
  modified_base 17: mod_base = OTHER; note = 2'-O-methoxyethyl modified nucleotide
  modified_base 18: mod_base = OTHER; note = 2'-O-methoxyethyl modified thymine
cagagcaaagaggagtat

SEQ ID NO: 198 - RNA, 18 nt, synthetic construct
  source 1..18: mol_type = other RNA
  modified_base 1: mod_base = OTHER; note = 2'-O-methoxyethyl modified nucleotide
  modified_base 2: mod_base = OTHER; note = 2'-O-methoxyethyl modified 5-methylcytosine
  modified_base 3: mod_base = OTHER; note = 2'-O-methoxyethyl modified nucleotide
  modified_base 4: mod_base = OTHER; note = 2'-O-methoxyethyl modified nucleotide
  modified_base 5: mod_base = OTHER; note = 2'-O-methoxyethyl modified thymine
  modified_base 6: mod_base = OTHER; note = 2'-O-methoxyethyl modified 5-methylcytosine
  modified_base 7: mod_base = OTHER; note = 2'-O-methoxyethyl modified nucleotide
  modified_base 8: mod_base = OTHER; note = 2'-O-methoxyethyl modified nucleotide
  modified_base 9: mod_base = OTHER; note = 2'-O-methoxyethyl modified nucleotide
  modified_base 10: mod_base = OTHER; note = 2'-O-methoxyethyl modified nucleotide
  modified_base 11: mod_base = OTHER; note = 2'-O-methoxyethyl modified 5-methylcytosine
  modified_base 12: mod_base = OTHER; note = 2'-O-methoxyethyl modified nucleotide
  modified_base 13: mod_base = OTHER; note = 2'-O-methoxyethyl modified nucleotide
  modified_base 14: mod_base = OTHER; note = 2'-O-methoxyethyl modified nucleotide
  modified_base 15: mod_base = OTHER; note = 2'-O-methoxyethyl modified nucleotide
  modified_base 16: mod_base = OTHER; note = 2'-O-methoxyethyl modified nucleotide
  modified_base 17: mod_base = OTHER; note = 2'-O-methoxyethyl modified nucleotide
  modified_base 18: mod_base = OTHER; note = 2'-O-methoxyethyl modified nucleotide
gcagtcagagcaaagagg

SEQ ID NO: 199 - RNA, 18 nt, synthetic construct
  source 1..18: mol_type = other RNA
  modified_base 1: mod_base = OTHER; note = 2'-O-methoxyethyl modified nucleotide
  modified_base 2: mod_base = OTHER; note = 2'-O-methoxyethyl modified 5-methylcytosine
  modified_base 3: mod_base = OTHER; note = 2'-O-methoxyethyl modified 5-methylcytosine
  modified_base 4: mod_base = OTHER; note = 2'-O-methoxyethyl modified thymine
  modified_base 5: mod_base = OTHER; note = 2'-O-methoxyethyl modified nucleotide
  modified_base 6: mod_base = OTHER; note = 2'-O-methoxyethyl modified nucleotide
  modified_base 7: mod_base = OTHER; note = 2'-O-methoxyethyl modified 5-methylcytosine
  modified_base 8: mod_base = OTHER; note = 2'-O-methoxyethyl modified nucleotide
  modified_base 9: mod_base = OTHER; note = 2'-O-methoxyethyl modified nucleotide
  modified_base 10: mod_base = OTHER; note = 2'-O-methoxyethyl modified thymine
  modified_base 11: mod_base = OTHER; note = 2'-O-methoxyethyl modified 5-methylcytosine
  modified_base 12: mod_base = OTHER; note = 2'-O-methoxyethyl modified nucleotide
  modified_base 13: mod_base = OTHER; note = 2'-O-methoxyethyl modified nucleotide
  modified_base 14: mod_base = OTHER; note = 2'-O-methoxyethyl modified nucleotide
  modified_base 15: mod_base = OTHER; note = 2'-O-methoxyethyl modified nucleotide
  modified_base 16: mod_base = OTHER; note = 2'-O-methoxyethyl modified 5-methylcytosine
  modified_base 17: mod_base = OTHER; note = 2'-O-methoxyethyl modified nucleotide
  modified_base 18: mod_base = OTHER; note = 2'-O-methoxyethyl modified nucleotide
gcctagcagtcagagcaa

SEQ ID NO: 200 - RNA, 18 nt, synthetic construct
  source 1..18: mol_type = other RNA
  modified_base 1: mod_base = OTHER; note = 2'-O-methoxyethyl modified nucleotide
  modified_base 2: mod_base = OTHER; note = 2'-O-methoxyethyl modified nucleotide
  modified_base 3: mod_base = OTHER; note = 2'-O-methoxyethyl modified nucleotide
  modified_base 4: mod_base = OTHER; note = 2'-O-methoxyethyl modified nucleotide
  modified_base 5: mod_base = OTHER; note = 2'-O-methoxyethyl modified nucleotide
  modified_base 6: mod_base = OTHER; note = 2'-O-methoxyethyl modified nucleotide
  modified_base 7: mod_base = OTHER; note = 2'-O-methoxyethyl modified 5-methylcytosine
  modified_base 8: mod_base = OTHER; note = 2'-O-methoxyethyl modified 5-methylcytosine
  modified_base 9: mod_base = OTHER; note = 2'-O-methoxyethyl modified thymine
  modified_base 10: mod_base = OTHER; note = 2'-O-methoxyethyl modified nucleotide
  modified_base 11: mod_base = OTHER; note = 2'-O-methoxyethyl modified nucleotide
  modified_base 12: mod_base = OTHER; note = 2'-O-methoxyethyl modified 5-methylcytosine
  modified_base 13: mod_base = OTHER; note = 2'-O-methoxyethyl modified nucleotide
  modified_base 14: mod_base = OTHER; note = 2'-O-methoxyethyl modified nucleotide
  modified_base 15: mod_base = OTHER; note = 2'-O-methoxyethyl modified thymine
  modified_base 16: mod_base = OTHER; note = 2'-O-methoxyethyl modified 5-methylcytosine
  modified_base 17: mod_base = OTHER; note = 2'-O-methoxyethyl modified nucleotide
  modified_base 18: mod_base = OTHER; note = 2'-O-methoxyethyl modified nucleotide
ggggagcctagcagtcag

SEQ ID NO: 201 - RNA, 18 nt, synthetic construct
  source 1..18: mol_type = other RNA
  modified_base 1: mod_base = OTHER; note = 2'-O-methoxyethyl modified nucleotide
  modified_base 2: mod_base = OTHER; note = 2'-O-methoxyethyl modified nucleotide
  modified_base 3: mod_base = OTHER; note = 2'-O-methoxyethyl modified 5-methylcytosine
  modified_base 4: mod_base = OTHER; note = 2'-O-methoxyethyl modified nucleotide
  modified_base 5: mod_base = OTHER; note = 2'-O-methoxyethyl modified nucleotide
  modified_base 6: mod_base = OTHER; note = 2'-O-methoxyethyl modified nucleotide
  modified_base 7: mod_base = OTHER; note = 2'-O-methoxyethyl modified nucleotide
  modified_base 8: mod_base = OTHER; note = 2'-O-methoxyethyl modified nucleotide
  modified_base 9: mod_base = OTHER; note = 2'-O-methoxyethyl modified nucleotide
  modified_base 10: mod_base = OTHER; note = 2'-O-methoxyethyl modified nucleotide
  modified_base 11: mod_base = OTHER; note = 2'-O-methoxyethyl modified nucleotide
  modified_base 12: mod_base = OTHER; note = 2'-O-methoxyethyl modified 5-methylcytosine
  modified_base 13: mod_base = OTHER; note = 2'-O-methoxyethyl modified 5-methylcytosine
  modified_base 14: mod_base = OTHER; note = 2'-O-methoxyethyl modified thymine
  modified_base 15: mod_base = OTHER; note = 2'-O-methoxyethyl modified nucleotide
  modified_base 16: mod_base = OTHER; note = 2'-O-methoxyethyl modified nucleotide
  modified_base 17: mod_base = OTHER; note = 2'-O-methoxyethyl modified 5-methylcytosine
  modified_base 18: mod_base = OTHER; note = 2'-O-methoxyethyl modified nucleotide
ggcggggggagcctagca

SEQ ID NO: 202 - RNA, 18 nt, synthetic construct
  source 1..18: mol_type = other RNA
  modified_base 1: mod_base = OTHER; note = 2'-O-methoxyethyl modified thymine
  modified_base 2: mod_base = OTHER; note = 2'-O-methoxyethyl modified nucleotide
  modified_base 3: mod_base = OTHER; note = 2'-O-methoxyethyl modified nucleotide
  modified_base 4: mod_base = OTHER; note = 2'-O-methoxyethyl modified 5-methylcytosine
  modified_base 5: mod_base = OTHER; note = 2'-O-methoxyethyl modified nucleotide
  modified_base 6: mod_base = OTHER; note = 2'-O-methoxyethyl modified nucleotide
  modified_base 7: mod_base = OTHER; note = 2'-O-methoxyethyl modified nucleotide
  modified_base 8: mod_base = OTHER; note = 2'-O-methoxyethyl modified 5-methylcytosine
  modified_base 9: mod_base = OTHER; note = 2'-O-methoxyethyl modified nucleotide
  modified_base 10: mod_base = OTHER; note = 2'-O-methoxyethyl modified nucleotide
  modified_base 11: mod_base = OTHER; note = 2'-O-methoxyethyl modified nucleotide
  modified_base 12: mod_base = OTHER; note = 2'-O-methoxyethyl modified nucleotide
  modified_base 13: mod_base = OTHER; note = 2'-O-methoxyethyl modified nucleotide
  modified_base 14: mod_base = OTHER; note = 2'-O-methoxyethyl modified nucleotide
  modified_base 15: mod_base = OTHER; note = 2'-O-methoxyethyl modified nucleotide
  modified_base 16: mod_base = OTHER; note = 2'-O-methoxyethyl modified nucleotide
  modified_base 17: mod_base = OTHER; note = 2'-O-methoxyethyl modified 5-methylcytosine
  modified_base 18: mod_base = OTHER; note = 2'-O-methoxyethyl modified 5-methylcytosine
tggcaggcggggggagcc

SEQ ID NO: 203 - RNA, 18 nt, synthetic construct
  source 1..18: mol_type = other RNA
  modified_base 1: mod_base = OTHER; note = 2'-O-methoxyethyl modified nucleotide
  modified_base 2: mod_base = OTHER; note = 2'-O-methoxyethyl modified nucleotide
  modified_base 3: mod_base = OTHER; note = 2'-O-methoxyethyl modified nucleotide
  modified_base 4: mod_base = OTHER; note = 2'-O-methoxyethyl modified nucleotide
  modified_base 5: mod_base = OTHER; note = 2'-O-methoxyethyl modified nucleotide
  modified_base 6: mod_base = OTHER; note = 2'-O-methoxyethyl modified thymine
  modified_base 7: mod_base = OTHER; note = 2'-O-methoxyethyl modified nucleotide
  modified_base 8: mod_base = OTHER; note = 2'-O-methoxyethyl modified nucleotide
  modified_base 9: mod_base = OTHER; note = 2'-O-methoxyethyl modified 5-methylcytosine
  modified_base 10: mod_base = OTHER; note = 2'-O-methoxyethyl modified nucleotide
  modified_base 11: mod_base = OTHER; note = 2'-O-methoxyethyl modified nucleotide
  modified_base 12: mod_base = OTHER; note = 2'-O-methoxyethyl modified nucleotide
  modified_base 13: mod_base = OTHER; note = 2'-O-methoxyethyl modified 5-methylcytosine
  modified_base 14: mod_base = OTHER; note = 2'-O-methoxyethyl modified nucleotide
  modified_base 15: mod_base = OTHER; note = 2'-O-methoxyethyl modified nucleotide
  modified_base 16: mod_base = OTHER; note = 2'-O-methoxyethyl modified nucleotide
  modified_base 17: mod_base = OTHER; note = 2'-O-methoxyethyl modified nucleotide
  modified_base 18: mod_base = OTHER; note = 2'-O-methoxyethyl modified nucleotide
ggggatggcaggcggggg

SEQ ID NO: 204 - RNA, 18 nt, synthetic construct
  source 1..18: mol_type = other RNA
  modified_base 1: mod_base = OTHER; note = 2'-O-methoxyethyl modified nucleotide
  modified_base 2: mod_base = OTHER; note = 2'-O-methoxyethyl modified nucleotide
  modified_base 3: mod_base = OTHER; note = 2'-O-methoxyethyl modified thymine
  modified_base 4: mod_base = OTHER; note = 2'-O-methoxyethyl modified nucleotide
  modified_base 5: mod_base = OTHER; note = 2'-O-methoxyethyl modified nucleotide
  modified_base 6: mod_base = OTHER; note = 2'-O-methoxyethyl modified nucleotide
  modified_base 7: mod_base = OTHER; note = 2'-O-methoxyethyl modified nucleotide
  modified_base 8: mod_base = OTHER; note = 2'-O-methoxyethyl modified nucleotide
  modified_base 9: mod_base = OTHER; note = 2'-O-methoxyethyl modified nucleotide
  modified_base 10: mod_base = OTHER; note = 2'-O-methoxyethyl modified nucleotide
  modified_base 11: mod_base = OTHER; note = 2'-O-methoxyethyl modified thymine
  modified_base 12: mod_base = OTHER; note = 2'-O-methoxyethyl modified nucleotide
  modified_base 13: mod_base = OTHER; note = 2'-O-methoxyethyl modified nucleotide
  modified_base 14: mod_base = OTHER; note = 2'-O-methoxyethyl modified 5-methylcytosine
  modified_base 15: mod_base = OTHER; note = 2'-O-methoxyethyl modified nucleotide
  modified_base 16: mod_base = OTHER; note = 2'-O-methoxyethyl modified nucleotide
  modified_base 17: mod_base = OTHER; note = 2'-O-methoxyethyl modified nucleotide
  modified_base 18: mod_base = OTHER; note = 2'-O-methoxyethyl modified 5-methylcytosine
ggtggggggatggcaggc

SEQ ID NO: 205 - RNA, 18 nt, synthetic construct
  source 1..18: mol_type = other RNA
  modified_base 1: mod_base = OTHER; note = 2'-O-methoxyethyl modified nucleotide
  modified_base 2: mod_base = OTHER; note = 2'-O-methoxyethyl modified 5-methylcytosine
  modified_base 3: mod_base = OTHER; note = 2'-O-methoxyethyl modified 5-methylcytosine
  modified_base 4: mod_base = OTHER; note = 2'-O-methoxyethyl modified thymine
  modified_base 5: mod_base = OTHER; note = 2'-O-methoxyethyl modified thymine
  modified_base 6: mod_base = OTHER; note = 2'-O-methoxyethyl modified nucleotide
  modified_base 7: mod_base = OTHER; note = 2'-O-methoxyethyl modified nucleotide
  modified_base 8: mod_base = OTHER; note = 2'-O-methoxyethyl modified thymine
  modified_base 9: mod_base = OTHER; note = 2'-O-methoxyethyl modified nucleotide
  modified_base 10: mod_base = OTHER; note = 2'-O-methoxyethyl modified nucleotide
  modified_base 11: mod_base = OTHER; note = 2'-O-methoxyethyl modified nucleotide
  modified_base 12: mod_base = OTHER; note = 2'-O-methoxyethyl modified nucleotide
  modified_base 13: mod_base = OTHER; note = 2'-O-methoxyethyl modified nucleotide
  modified_base 14: mod_base = OTHER; note = 2'-O-methoxyethyl modified nucleotide
  modified_base 15: mod_base = OTHER; note = 2'-O-methoxyethyl modified nucleotide
  modified_base 16: mod_base = OTHER; note = 2'-O-methoxyethyl modified thymine
  modified_base 17: mod_base = OTHER; note = 2'-O-methoxyethyl modified nucleotide
  modified_base 18: mod_base = OTHER; note = 2'-O-methoxyethyl modified nucleotide
gccttggtggggggatgg

SEQ ID NO: 206 - RNA, 18 nt, synthetic construct
  source 1..18: mol_type = other RNA
  modified_base 1: mod_base = OTHER; note = 2'-O-methoxyethyl modified 5-methylcytosine
  modified_base 2: mod_base = OTHER; note = 2'-O-methoxyethyl modified nucleotide
  modified_base 3: mod_base = OTHER; note = 2'-O-methoxyethyl modified nucleotide
  modified_base 4: mod_base = OTHER; note = 2'-O-methoxyethyl modified nucleotide
  modified_base 5: mod_base = OTHER; note = 2'-O-methoxyethyl modified nucleotide
  modified_base 6: mod_base = OTHER; note = 2'-O-methoxyethyl modified nucleotide
  modified_base 7: mod_base = OTHER; note = 2'-O-methoxyethyl modified 5-methylcytosine
  modified_base 8: mod_base = OTHER; note = 2'-O-methoxyethyl modified 5-methylcytosine
  modified_base 9: mod_base = OTHER; note = 2'-O-methoxyethyl modified thymine
  modified_base 10: mod_base = OTHER; note = 2'-O-methoxyethyl modified thymine
  modified_base 11: mod_base = OTHER; note = 2'-O-methoxyethyl modified nucleotide
  modified_base 12: mod_base = OTHER; note = 2'-O-methoxyethyl modified nucleotide
  modified_base 13: mod_base = OTHER; note = 2'-O-methoxyethyl modified thymine
  modified_base 14: mod_base = OTHER; note = 2'-O-methoxyethyl modified nucleotide
  modified_base 15: mod_base = OTHER; note = 2'-O-methoxyethyl modified nucleotide
  modified_base 16: mod_base = OTHER; note = 2'-O-methoxyethyl modified nucleotide
  modified_base 17: mod_base = OTHER; note = 2'-O-methoxyethyl modified nucleotide
  modified_base 18: mod_base = OTHER; note = 2'-O-methoxyethyl modified nucleotide
caggagccttggtggggg

SEQ ID NO: 207 - RNA, 18 nt, synthetic construct
  source 1..18: mol_type = other RNA
  modified_base 1: mod_base = OTHER; note = 2'-O-methoxyethyl modified nucleotide
  modified_base 2: mod_base = OTHER; note = 2'-O-methoxyethyl modified nucleotide
  modified_base 3: mod_base = OTHER; note = 2'-O-methoxyethyl modified nucleotide
  modified_base 4: mod_base = OTHER; note = 2'-O-methoxyethyl modified nucleotide
  modified_base 5: mod_base = OTHER; note = 2'-O-methoxyethyl modified thymine
  modified_base 6: mod_base = OTHER; note = 2'-O-methoxyethyl modified 5-methylcytosine
  modified_base 7: mod_base = OTHER; note = 2'-O-methoxyethyl modified nucleotide
  modified_base 8: mod_base = OTHER; note = 2'-O-methoxyethyl modified nucleotide
  modified_base 9: mod_base = OTHER; note = 2'-O-methoxyethyl modified nucleotide
  modified_base 10: mod_base = OTHER; note = 2'-O-methoxyethyl modified nucleotide
  modified_base 11: mod_base = OTHER; note = 2'-O-methoxyethyl modified nucleotide
  modified_base 12: mod_base = OTHER; note = 2'-O-methoxyethyl modified 5-methylcytosine
  modified_base 13: mod_base = OTHER; note = 2'-O-methoxyethyl modified 5-methylcytosine
  modified_base 14: mod_base = OTHER; note = 2'-O-methoxyethyl modified thymine
  modified_base 15: mod_base = OTHER; note = 2'-O-methoxyethyl modified thymine
  modified_base 16: mod_base = OTHER; note = 2'-O-methoxyethyl modified nucleotide
  modified_base 17: mod_base = OTHER; note = 2'-O-methoxyethyl modified nucleotide
  modified_base 18: mod_base = OTHER; note = 2'-O-methoxyethyl modified thymine
ggggtcaggagccttggt

SEQ ID NO: 208 - RNA, 18 nt, synthetic construct
  source 1..18: mol_type = other RNA
  modified_base 1: mod_base = OTHER; note = 2'-O-methoxyethyl modified nucleotide
  modified_base 2: mod_base = OTHER; note = 2'-O-methoxyethyl modified thymine
  modified_base 3: mod_base = OTHER; note = 2'-O-methoxyethyl modified 5-methylcytosine
  modified_base 4: mod_base = OTHER; note = 2'-O-methoxyethyl modified nucleotide
  modified_base 5: mod_base = OTHER; note = 2'-O-methoxyethyl modified thymine
  modified_base 6: mod_base = OTHER; note = 2'-O-methoxyethyl modified nucleotide
  modified_base 7: mod_base = OTHER; note = 2'-O-methoxyethyl modified nucleotide
  modified_base 8: mod_base = OTHER; note = 2'-O-methoxyethyl modified nucleotide
  modified_base 9: mod_base = OTHER; note = 2'-O-methoxyethyl modified nucleotide
  modified_base 10: mod_base = OTHER; note = 2'-O-methoxyethyl modified thymine
  modified_base 11: mod_base = OTHER; note = 2'-O-methoxyethyl modified 5-methylcytosine
  modified_base 12: mod_base = OTHER; note = 2'-O-methoxyethyl modified nucleotide
  modified_base 13: mod_base = OTHER; note = 2'-O-methoxyethyl modified nucleotide
  modified_base 14: mod_base = OTHER; note = 2'-O-methoxyethyl modified nucleotide
  modified_base 15: mod_base = OTHER; note = 2'-O-methoxyethyl modified nucleotide
  modified_base 16: mod_base = OTHER; note = 2'-O-methoxyethyl modified nucleotide
  modified_base 17: mod_base = OTHER; note = 2'-O-methoxyethyl modified 5-methylcytosine
  modified_base 18: mod_base = OTHER; note = 2'-O-methoxyethyl modified 5-methylcytosine
gtcatggggtcaggagcc

SEQ ID NO: 209 - RNA, 18 nt, synthetic construct
  source 1..18: mol_type = other RNA
  modified_base 1: mod_base = OTHER; note = 2'-O-methoxyethyl modified nucleotide
  modified_base 2: mod_base = OTHER; note = 2'-O-methoxyethyl modified thymine
  modified_base 3: mod_base = OTHER; note = 2'-O-methoxyethyl modified nucleotide
  modified_base 4: mod_base = OTHER; note = 2'-O-methoxyethyl modified nucleotide
  modified_base 5: mod_base = OTHER; note = 2'-O-methoxyethyl modified nucleotide
  modified_base 6: mod_base = OTHER; note = 2'-O-methoxyethyl modified nucleotide
  modified_base 7: mod_base = OTHER; note = 2'-O-methoxyethyl modified thymine
  modified_base 8: mod_base = OTHER; note = 2'-O-methoxyethyl modified 5-methylcytosine
  modified_base 9: mod_base = OTHER; note = 2'-O-methoxyethyl modified nucleotide
  modified_base 10: mod_base = OTHER; note = 2'-O-methoxyethyl modified thymine
  modified_base 11: mod_base = OTHER; note = 2'-O-methoxyethyl modified nucleotide
  modified_base 12: mod_base = OTHER; note = 2'-O-methoxyethyl modified nucleotide
  modified_base 13: mod_base = OTHER; note = 2'-O-methoxyethyl modified nucleotide
  modified_base 14: mod_base = OTHER; note = 2'-O-methoxyethyl modified nucleotide
  modified_base 15: mod_base = OTHER; note = 2'-O-methoxyethyl modified thymine
  modified_base 16: mod_base = OTHER; note = 2'-O-methoxyethyl modified 5-methylcytosine
  modified_base 17: mod_base = OTHER; note = 2'-O-methoxyethyl modified nucleotide
  modified_base 18: mod_base = OTHER; note = 2'-O-methoxyethyl modified nucleotide
gtggggtcatggggtcag

SEQ ID NO: 210 - RNA, 18 nt, synthetic construct
  source 1..18: mol_type = other RNA
  modified_base 1: mod_base = OTHER; note = 2'-O-methoxyethyl modified nucleotide
  modified_base 2: mod_base = OTHER; note = 2'-O-methoxyethyl modified nucleotide
  modified_base 3: mod_base = OTHER; note = 2'-O-methoxyethyl modified nucleotide
  modified_base 4: mod_base = OTHER; note = 2'-O-methoxyethyl modified nucleotide
  modified_base 5: mod_base = OTHER; note = 2'-O-methoxyethyl modified nucleotide
  modified_base 6: mod_base = OTHER; note = 2'-O-methoxyethyl modified nucleotide
  modified_base 7: mod_base = OTHER; note = 2'-O-methoxyethyl modified thymine
  modified_base 8: mod_base = OTHER; note = 2'-O-methoxyethyl modified nucleotide
  modified_base 9: mod_base = OTHER; note = 2'-O-methoxyethyl modified nucleotide
  modified_base 10: mod_base = OTHER; note = 2'-O-methoxyethyl modified nucleotide
  modified_base 11: mod_base = OTHER; note = 2'-O-methoxyethyl modified nucleotide
  modified_base 12: mod_base = OTHER; note = 2'-O-methoxyethyl modified thymine
  modified_base 13: mod_base = OTHER; note = 2'-O-methoxyethyl modified 5-methylcytosine
  modified_base 14: mod_base = OTHER; note = 2'-O-methoxyethyl modified nucleotide
  modified_base 15: mod_base = OTHER; note = 2'-O-methoxyethyl modified thymine
  modified_base 16: mod_base = OTHER; note = 2'-O-methoxyethyl modified nucleotide
  modified_base 17: mod_base = OTHER; note = 2'-O-methoxyethyl modified nucleotide
  modified_base 18: mod_base = OTHER; note = 2'-O-methoxyethyl modified nucleotide
agagagtggggtcatggg

SEQ ID NO: 211 - RNA, 18 nt, synthetic construct
  source 1..18: mol_type = other RNA
  modified_base 1: mod_base = OTHER; note = 2'-O-methoxyethyl modified nucleotide
  modified_base 2: mod_base = OTHER; note = 2'-O-methoxyethyl modified thymine
  modified_base 3: mod_base = OTHER; note = 2'-O-methoxyethyl modified nucleotide
  modified_base 4: mod_base = OTHER; note = 2'-O-methoxyethyl modified nucleotide
  modified_base 5: mod_base = OTHER; note = 2'-O-methoxyethyl modified nucleotide
  modified_base 6: mod_base = OTHER; note = 2'-O-methoxyethyl modified nucleotide
  modified_base 7: mod_base = OTHER; note = 2'-O-methoxyethyl modified nucleotide
  modified_base 8: mod_base = OTHER; note = 2'-O-methoxyethyl modified nucleotide
  modified_base 9: mod_base = OTHER; note = 2'-O-methoxyethyl modified nucleotide
  modified_base 10: mod_base = OTHER; note = 2'-O-methoxyethyl modified nucleotide
  modified_base 11: mod_base = OTHER; note = 2'-O-methoxyethyl modified nucleotide
  modified_base 12: mod_base = OTHER; note = 2'-O-methoxyethyl modified thymine
  modified_base 13: mod_base = OTHER; note = 2'-O-methoxyethyl modified nucleotide
  modified_base 14: mod_base = OTHER; note = 2'-O-methoxyethyl modified nucleotide
  modified_base 15: mod_base = OTHER; note = 2'-O-methoxyethyl modified nucleotide
  modified_base 16: mod_base = OTHER; note = 2'-O-methoxyethyl modified nucleotide
  modified_base 17: mod_base = OTHER; note = 2'-O-methoxyethyl modified thymine
  modified_base 18: mod_base = OTHER; note = 2'-O-methoxyethyl modified 5-methylcytosine
gtgggagagagtggggtc

SEQ ID NO: 212 - RNA, 18 nt, synthetic construct
  source 1..18: mol_type = other RNA
  modified_base 1: mod_base = OTHER; note = 2'-O-methoxyethyl modified 5-methylcytosine
  modified_base 2: mod_base = OTHER; note = 2'-O-methoxyethyl modified thymine
  modified_base 3: mod_base = OTHER; note = 2'-O-methoxyethyl modified nucleotide
  modified_base 4: mod_base = OTHER; note = 2'-O-methoxyethyl modified 5-methylcytosine
  modified_base 5: mod_base = OTHER; note = 2'-O-methoxyethyl modified nucleotide
  modified_base 6: mod_base = OTHER; note = 2'-O-methoxyethyl modified nucleotide
  modified_base 7: mod_base = OTHER; note = 2'-O-methoxyethyl modified thymine
  modified_base 8: mod_base = OTHER; note = 2'-O-methoxyethyl modified nucleotide
  modified_base 9: mod_base = OTHER; note = 2'-O-methoxyethyl modified nucleotide
  modified_base 10: mod_base = OTHER; note = 2'-O-methoxyethyl modified nucleotide
  modified_base 11: mod_base = OTHER; note = 2'-O-methoxyethyl modified nucleotide
  modified_base 12: mod_base = OTHER; note = 2'-O-methoxyethyl modified nucleotide
  modified_base 13: mod_base = OTHER; note = 2'-O-methoxyethyl modified nucleotide
  modified_base 14: mod_base = OTHER; note = 2'-O-methoxyethyl modified nucleotide
  modified_base 15: mod_base = OTHER; note = 2'-O-methoxyethyl modified nucleotide
  modified_base 16: mod_base = OTHER; note = 2'-O-methoxyethyl modified nucleotide
  modified_base 17: mod_base = OTHER; note = 2'-O-methoxyethyl modified thymine
  modified_base 18: mod_base = OTHER; note = 2'-O-methoxyethyl modified nucleotide
ctgcagtgggagagagtg

SEQ ID NO: 213 - RNA, 18 nt, synthetic construct
  source 1..18: mol_type = other RNA
  modified_base 1: mod_base = OTHER; note = 2'-O-methoxyethyl modified nucleotide
  modified_base 2: mod_base = OTHER; note = 2'-O-methoxyethyl modified nucleotide
  modified_base 3: mod_base = OTHER; note = 2'-O-methoxyethyl modified nucleotide
  modified_base 4: mod_base = OTHER; note = 2'-O-methoxyethyl modified nucleotide
  modified_base 5: mod_base = OTHER; note = 2'-O-methoxyethyl modified nucleotide
  modified_base 6: mod_base = OTHER; note = 2'-O-methoxyethyl modified 5-methylcytosine
  modified_base 7: mod_base = OTHER; note = 2'-O-methoxyethyl modified thymine
  modified_base 8: mod_base = OTHER; note = 2'-O-methoxyethyl modified nucleotide
  modified_base 9: mod_base = OTHER; note = 2'-O-methoxyethyl modified 5-methylcytosine
  modified_base 10: mod_base = OTHER; note = 2'-O-methoxyethyl modified nucleotide
  modified_base 11: mod_base = OTHER; note = 2'-O-methoxyethyl modified nucleotide
  modified_base 12: mod_base = OTHER; note = 2'-O-methoxyethyl modified thymine
  modified_base 13: mod_base = OTHER; note = 2'-O-methoxyethyl modified nucleotide
  modified_base 14: mod_base = OTHER; note = 2'-O-methoxyethyl modified nucleotide
  modified_base 15: mod_base = OTHER; note = 2'-O-methoxyethyl modified nucleotide
  modified_base 16: mod_base = OTHER; note = 2'-O-methoxyethyl modified nucleotide
  modified_base 17: mod_base = OTHER; note = 2'-O-methoxyethyl modified nucleotide
  modified_base 18: mod_base = OTHER; note = 2'-O-methoxyethyl modified nucleotide
aggagctgcagtgggaga

SEQ ID NO: 214 - RNA, 18 nt, synthetic construct
  source 1..18: mol_type = other RNA
  modified_base 1: mod_base = OTHER; note = 2'-O-methoxyethyl modified thymine
  modified_base 2: mod_base = OTHER; note = 2'-O-methoxyethyl modified nucleotide
  modified_base 3: mod_base = OTHER; note = 2'-O-methoxyethyl modified nucleotide
  modified_base 4: mod_base = OTHER; note = 2'-O-methoxyethyl modified thymine
  modified_base 5: mod_base = OTHER; note = 2'-O-methoxyethyl modified nucleotide
  modified_base 6: mod_base = OTHER; note = 2'-O-methoxyethyl modified nucleotide
  modified_base 7: mod_base = OTHER; note = 2'-O-methoxyethyl modified nucleotide
  modified_base 8: mod_base = OTHER; note = 2'-O-methoxyethyl modified nucleotide
  modified_base 9: mod_base = OTHER; note = 2'-O-methoxyethyl modified nucleotide
  modified_base 10: mod_base = OTHER; note = 2'-O-methoxyethyl modified nucleotide
  modified_base 11: mod_base = OTHER; note = 2'-O-methoxyethyl modified 5-methylcytosine
  modified_base 12: mod_base = OTHER; note = 2'-O-methoxyethyl modified thymine
  modified_base 13: mod_base = OTHER; note = 2'-O-methoxyethyl modified nucleotide
  modified_base 14: mod_base = OTHER; note = 2'-O-methoxyethyl modified 5-methylcytosine
  modified_base 15: mod_base = OTHER; note = 2'-O-methoxyethyl modified nucleotide
  modified_base 16: mod_base = OTHER; note = 2'-O-methoxyethyl modified nucleotide
  modified_base 17: mod_base = OTHER; note = 2'-O-methoxyethyl modified thymine
  modified_base 18: mod_base = OTHER; note = 2'-O-methoxyethyl modified nucleotide
tgatgaggagctgcagtg

SEQ ID NO: 215 - RNA, 18 nt, synthetic construct
  source 1..18: mol_type = other RNA
  modified_base 1: mod_base = OTHER; note = 2'-O-methoxyethyl modified thymine
  modified_base 2: mod_base = OTHER; note = 2'-O-methoxyethyl modified thymine
  modified_base 3: mod_base = OTHER; note = 2'-O-methoxyethyl modified nucleotide
  modified_base 4: mod_base = OTHER; note = 2'-O-methoxyethyl modified 5-methylcytosine
  modified_base 5: mod_base = OTHER; note = 2'-O-methoxyethyl modified 5-methylcytosine
  modified_base 6: mod_base = OTHER; note = 2'-O-methoxyethyl modified thymine
  modified_base 7: mod_base = OTHER; note = 2'-O-methoxyethyl modified nucleotide
  modified_base 8: mod_base = OTHER; note = 2'-O-methoxyethyl modified nucleotide
  modified_base 9: mod_base = OTHER; note = 2'-O-methoxyethyl modified thymine
  modified_base 10: mod_base = OTHER; note = 2'-O-methoxyethyl modified nucleotide
  modified_base 11: mod_base = OTHER; note = 2'-O-methoxyethyl modified nucleotide
  modified_base 12: mod_base = OTHER; note = 2'-O-methoxyethyl modified nucleotide
  modified_base 13: mod_base = OTHER; note = 2'-O-methoxyethyl modified nucleotide
  modified_base 14: mod_base = OTHER; note = 2'-O-methoxyethyl modified nucleotide
  modified_base 15: mod_base = OTHER; note = 2'-O-methoxyethyl modified nucleotide
  modified_base 16: mod_base = OTHER; note = 2'-O-methoxyethyl modified 5-methylcytosine
  modified_base 17: mod_base = OTHER; note = 2'-O-methoxyethyl modified thymine
  modified_base 18: mod_base = OTHER; note = 2'-O-methoxyethyl modified nucleotide
ttacctgatgaggagctg

SEQ ID NO: 216 - RNA, 18 nt, synthetic construct
  source 1..18: mol_type = other RNA
  modified_base 1: mod_base = OTHER; note = 2'-O-methoxyethyl modified nucleotide
  modified_base 2: mod_base = OTHER; note = 2'-O-methoxyethyl modified nucleotide
  modified_base 3: mod_base = OTHER; note = 2'-O-methoxyethyl modified nucleotide
  modified_base 4: mod_base = OTHER; note = 2'-O-methoxyethyl modified thymine
  modified_base 5: mod_base = OTHER; note = 2'-O-methoxyethyl modified thymine
  modified_base 6: mod_base = OTHER; note = 2'-O-methoxyethyl modified nucleotide
  modified_base 7: mod_base = OTHER; note = 2'-O-methoxyethyl modified 5-methylcytosine
  modified_base 8: mod_base = OTHER; note = 2'-O-methoxyethyl modified 5-methylcytosine
  modified_base 9: mod_base = OTHER; note = 2'-O-methoxyethyl modified thymine
  modified_base 10: mod_base = OTHER; note = 2'-O-methoxyethyl modified nucleotide
  modified_base 11: mod_base = OTHER; note = 2'-O-methoxyethyl modified nucleotide
  modified_base 12: mod_base = OTHER; note = 2'-O-methoxyethyl modified thymine
  modified_base 13: mod_base = OTHER; note = 2'-O-methoxyethyl modified nucleotide
  modified_base 14: mod_base = OTHER; note = 2'-O-methoxyethyl modified nucleotide
  modified_base 15: mod_base = OTHER; note = 2'-O-methoxyethyl modified nucleotide
  modified_base 16: mod_base = OTHER; note = 2'-O-methoxyethyl modified nucleotide
  modified_base 17: mod_base = OTHER; note = 2'-O-methoxyethyl modified nucleotide
  modified_base 18: mod_base = OTHER; note = 2'-O-methoxyethyl modified nucleotide
gaattacctgatgaggag

SEQ ID NO: 217 - RNA, 18 nt, synthetic construct
  source 1..18: mol_type = other RNA
  modified_base 1: mod_base = OTHER; note = 2'-O-methoxyethyl modified 5-methylcytosine
  modified_base 2: mod_base = OTHER; note = 2'-O-methoxyethyl modified nucleotide
  modified_base 3: mod_base = OTHER; note = 2'-O-methoxyethyl modified nucleotide
  modified_base 4: mod_base = OTHER; note = 2'-O-methoxyethyl modified nucleotide
  modified_base 5: mod_base = OTHER; note = 2'-O-methoxyethyl modified nucleotide
  modified_base 6: mod_base = OTHER; note = 2'-O-methoxyethyl modified nucleotide
  modified_base 7: mod_base = OTHER; note = 2'-O-methoxyethyl modified nucleotide
  modified_base 8: mod_base = OTHER; note = 2'-O-methoxyethyl modified nucleotide
  modified_base 9: mod_base = OTHER; note = 2'-O-methoxyethyl modified thymine
  modified_base 10: mod_base = OTHER; note = 2'-O-methoxyethyl modified thymine
  modified_base 11: mod_base = OTHER; note = 2'-O-methoxyethyl modified nucleotide
  modified_base 12: mod_base = OTHER; note = 2'-O-methoxyethyl modified 5-methylcytosine
  modified_base 13: mod_base = OTHER; note = 2'-O-methoxyethyl modified 5-methylcytosine
  modified_base 14: mod_base = OTHER; note = 2'-O-methoxyethyl modified thymine
  modified_base 15: mod_base = OTHER; note = 2'-O-methoxyethyl modified nucleotide
  modified_base 16: mod_base = OTHER; note = 2'-O-methoxyethyl modified nucleotide
  modified_base 17: mod_base = OTHER; note = 2'-O-methoxyethyl modified thymine
  modified_base 18: mod_base = OTHER; note = 2'-O-methoxyethyl modified nucleotide
caggagaattacctgatg

SEQ ID NO: 218 - RNA, 18 nt, synthetic construct
  source 1..18: mol_type = other RNA
  modified_base 1: mod_base = OTHER; note = 2'-O-methoxyethyl modified nucleotide
  modified_base 2: mod_base = OTHER; note = 2'-O-methoxyethyl modified nucleotide
  modified_base 3: mod_base = OTHER; note = 2'-O-methoxyethyl modified nucleotide
  modified_base 4: mod_base = OTHER; note = 2'-O-methoxyethyl modified nucleotide
  modified_base 5: mod_base = OTHER; note = 2'-O-methoxyethyl modified 5-methylcytosine
  modified_base 6: mod_base = OTHER; note = 2'-O-methoxyethyl modified 5-methylcytosine
  modified_base 7: mod_base = OTHER; note = 2'-O-methoxyethyl modified nucleotide
  modified_base 8: mod_base = OTHER; note = 2'-O-methoxyethyl modified nucleotide
  modified_base 9: mod_base = OTHER; note = 2'-O-methoxyethyl modified nucleotide
  modified_base 10: mod_base = OTHER; note = 2'-O-methoxyethyl modified nucleotide
  modified_base 11: mod_base = OTHER; note = 2'-O-methoxyethyl modified nucleotide
  modified_base 12: mod_base = OTHER; note = 2'-O-methoxyethyl modified nucleotide
  modified_base 13: mod_base = OTHER; note = 2'-O-methoxyethyl modified nucleotide
  modified_base 14: mod_base = OTHER; note = 2'-O-methoxyethyl modified thymine
  modified_base 15: mod_base = OTHER; note = 2'-O-methoxyethyl modified thymine
  modified_base 16: mod_base = OTHER; note = 2'-O-methoxyethyl modified nucleotide
  modified_base 17: mod_base = OTHER; note = 2'-O-methoxyethyl modified 5-methylcytosine
  modified_base 18: mod_base = OTHER; note = 2'-O-methoxyethyl modified 5-methylcytosine
ggaaccaggagaattacc

SEQ ID NO: 219 - RNA, 18 nt, synthetic construct
  source 1..18: mol_type = other RNA
  modified_base 1: mod_base = OTHER; note = 2'-O-methoxyethyl modified nucleotide
  modified_base 2: mod_base = OTHER; note = 2'-O-methoxyethyl modified nucleotide
  modified_base 3: mod_base = OTHER; note = 2'-O-methoxyethyl modified nucleotide
  modified_base 4: mod_base = OTHER; note = 2'-O-methoxyethyl modified nucleotide
  modified_base 5: mod_base = OTHER; note = 2'-O-methoxyethyl modified 5-methylcytosine
  modified_base 6: mod_base = OTHER; note = 2'-O-methoxyethyl modified nucleotide
  modified_base 7: mod_base = OTHER; note = 2'-O-methoxyethyl modified nucleotide
  modified_base 8: mod_base = OTHER; note = 2'-O-methoxyethyl modified nucleotide
  modified_base 9: mod_base = OTHER; note = 2'-O-methoxyethyl modified nucleotide
  modified_base 10: mod_base = OTHER; note = 2'-O-methoxyethyl modified 5-methylcytosine
  modified_base 11: mod_base = OTHER; note = 2'-O-methoxyethyl modified 5-methylcytosine
  modified_base 12: mod_base = OTHER; note = 2'-O-methoxyethyl modified nucleotide
  modified_base 13: mod_base = OTHER; note = 2'-O-methoxyethyl modified nucleotide
  modified_base 14: mod_base = OTHER; note = 2'-O-methoxyethyl modified nucleotide
  modified_base 15: mod_base = OTHER; note = 2'-O-methoxyethyl modified nucleotide
  modified_base 16: mod_base = OTHER; note = 2'-O-methoxyethyl modified nucleotide
  modified_base 17: mod_base = OTHER; note = 2'-O-methoxyethyl modified nucleotide
  modified_base 18: mod_base = OTHER; note = 2'-O-methoxyethyl modified nucleotide
aaagcggaaccaggagaa

SEQ ID NO: 220 - RNA, 18 nt, synthetic construct
  source 1..18: mol_type = other RNA
  modified_base 1: mod_base = OTHER; note = 2'-O-methoxyethyl modified thymine
  modified_base 2: mod_base = OTHER; note = 2'-O-methoxyethyl modified nucleotide
  modified_base 3: mod_base = OTHER; note = 2'-O-methoxyethyl modified nucleotide
  modified_base 4: mod_base = OTHER; note = 2'-O-methoxyethyl modified 5-methylcytosine
  modified_base 5: mod_base = OTHER; note = 2'-O-methoxyethyl modified 5-methylcytosine
  modified_base 6: mod_base = OTHER; note = 2'-O-methoxyethyl modified nucleotide
  modified_base 7: mod_base = OTHER; note = 2'-O-methoxyethyl modified nucleotide
  modified_base 8: mod_base = OTHER; note = 2'-O-methoxyethyl modified nucleotide
  modified_base 9: mod_base = OTHER; note = 2'-O-methoxyethyl modified nucleotide
  modified_base 10: mod_base = OTHER; note = 2'-O-methoxyethyl modified 5-methylcytosine
  modified_base 11: mod_base = OTHER; note = 2'-O-methoxyethyl modified nucleotide
  modified_base 12: mod_base = OTHER; note = 2'-O-methoxyethyl modified nucleotide
  modified_base 13: mod_base = OTHER; note = 2'-O-methoxyethyl modified nucleotide
  modified_base 14: mod_base = OTHER; note = 2'-O-methoxyethyl modified nucleotide
  modified_base 15: mod_base = OTHER; note = 2'-O-methoxyethyl modified 5-methylcytosine
  modified_base 16: mod_base = OTHER; note = 2'-O-methoxyethyl modified 5-methylcytosine
  modified_base 17: mod_base = OTHER; note = 2'-O-methoxyethyl modified nucleotide
  modified_base 18: mod_base = OTHER; note = 2'-O-methoxyethyl modified nucleotide
tggccaaagcggaaccag

SEQ ID NO: 221 - RNA, 18 nt, synthetic construct
  source 1..18: mol_type = other RNA
  modified_base 1: mod_base = OTHER; note = 2'-O-methoxyethyl modified nucleotide
  modified_base 2: mod_base = OTHER; note = 2'-O-methoxyethyl modified 5-methylcytosine
  modified_base 3: mod_base = OTHER; note = 2'-O-methoxyethyl modified 5-methylcytosine
  modified_base 4: mod_base = OTHER; note = 2'-O-methoxyethyl modified 5-methylcytosine
  modified_base 5: mod_base = OTHER; note = 2'-O-methoxyethyl modified nucleotide
  modified_base 6: mod_base = OTHER; note = 2'-O-methoxyethyl modified thymine
  modified_base 7: mod_base = OTHER; note = 2'-O-methoxyethyl modified nucleotide
  modified_base 8: mod_base = OTHER; note = 2'-O-methoxyethyl modified nucleotide
  modified_base 9: mod_base = OTHER; note = 2'-O-methoxyethyl modified 5-methylcytosine
  modified_base 10: mod_base = OTHER; note = 2'-O-methoxyethyl modified 5-methylcytosine
  modified_base 11: mod_base = OTHER; note = 2'-O-methoxyethyl modified nucleotide
  modified_base 12: mod_base = OTHER; note = 2'-O-methoxyethyl modified nucleotide
  modified_base 13: mod_base = OTHER; note = 2'-O-methoxyethyl modified nucleotide
  modified_base 14: mod_base = OTHER; note = 2'-O-methoxyethyl modified nucleotide
  modified_base 15: mod_base = OTHER; note = 2'-O-methoxyethyl modified 5-methylcytosine
  modified_base 16: mod_base = OTHER; note = 2'-O-methoxyethyl modified nucleotide
  modified_base 17: mod_base = OTHER; note = 2'-O-methoxyethyl modified nucleotide
  modified_base 18: mod_base = OTHER; note = 2'-O-methoxyethyl modified nucleotide
gcccgtggccaaagcgga

SEQ ID NO: 222 - RNA, 18 nt, synthetic construct
  source 1..18: mol_type = other RNA
  modified_base 1: mod_base = OTHER; note = 2'-O-methoxyethyl modified 5-methylcytosine
  modified_base 2: mod_base = OTHER; note = 2'-O-methoxyethyl modified 5-methylcytosine
  modified_base 3: mod_base = OTHER; note = 2'-O-methoxyethyl modified thymine
  modified_base 4: mod_base = OTHER; note = 2'-O-methoxyethyl modified 5-methylcytosine
  modified_base 5: mod_base = OTHER; note = 2'-O-methoxyethyl modified 5-methylcytosine
  modified_base 6: mod_base = OTHER; note = 2'-O-methoxyethyl modified nucleotide
  modified_base 7: mod_base = OTHER; note = 2'-O-methoxyethyl modified 5-methylcytosine
  modified_base 8: mod_base = OTHER; note = 2'-O-methoxyethyl modified 5-methylcytosine
  modified_base 9: mod_base = OTHER; note = 2'-O-methoxyethyl modified 5-methylcytosine
  modified_base 10: mod_base = OTHER; note = 2'-O-methoxyethyl modified nucleotide
  modified_base 11: mod_base = OTHER; note = 2'-O-methoxyethyl modified thymine
  modified_base 12: mod_base = OTHER; note = 2'-O-methoxyethyl modified nucleotide
  modified_base 13: mod_base = OTHER; note = 2'-O-methoxyethyl modified nucleotide
  modified_base 14: mod_base = OTHER; note = 2'-O-methoxyethyl modified 5-methylcytosine
  modified_base 15: mod_base = OTHER; note = 2'-O-methoxyethyl modified 5-methylcytosine
  modified_base 16: mod_base = OTHER; note = 2'-O-methoxyethyl modified nucleotide
  modified_base 17: mod_base = OTHER; note = 2'-O-methoxyethyl modified nucleotide
  modified_base 18: mod_base = OTHER; note = 2'-O-methoxyethyl modified nucleotide
cctccgcccgtggccaaa

SEQ ID NO: 223 - RNA, 18 nt, synthetic construct
  source 1..18: mol_type = other RNA
  modified_base 1: mod_base = OTHER; note = 2'-O-methoxyethyl modified 5-methylcytosine
  modified_base 2: mod_base = OTHER; note = 2'-O-methoxyethyl modified 5-methylcytosine
  modified_base 3: mod_base = OTHER; note = 2'-O-methoxyethyl modified thymine
  modified_base 4: mod_base = OTHER; note = 2'-O-methoxyethyl modified nucleotide
  modified_base 5: mod_base = OTHER; note = 2'-O-methoxyethyl modified thymine
  modified_base 6: mod_base = OTHER; note = 2'-O-methoxyethyl modified nucleotide
  modified_base 7: mod_base = OTHER; note = 2'-O-methoxyethyl modified thymine
  modified_base 8: mod_base = OTHER; note = 2'-O-methoxyethyl modified 5-methylcytosine
  modified_base 9: mod_base = OTHER; note = 2'-O-methoxyethyl modified 5-methylcytosine
  modified_base 10: mod_base = OTHER; note = 2'-O-methoxyethyl modified thymine
  modified_base 11: mod_base = OTHER; note = 2'-O-methoxyethyl modified 5-methylcytosine
  modified_base 12: mod_base = OTHER; note = 2'-O-methoxyethyl modified 5-methylcytosine
  modified_base 13: mod_base = OTHER; note = 2'-O-methoxyethyl modified nucleotide
  modified_base 14: mod_base = OTHER; note = 2'-O-methoxyethyl modified 5-methylcytosine
  modified_base 15: mod_base = OTHER; note = 2'-O-methoxyethyl modified 5-methylcytosine
  modified_base 16: mod_base = OTHER; note = 2'-O-methoxyethyl modified 5-methylcytosine
  modified_base 17: mod_base = OTHER; note = 2'-O-methoxyethyl modified nucleotide
  modified_base 18: mod_base = OTHER; note = 2'-O-methoxyethyl modified thymine
cctgtgtcctccgcccgt

SEQ ID NO: 224 - RNA, 18 nt, synthetic construct
  source 1..18: mol_type = other RNA
  modified_base 1: mod_base = OTHER; note = 2'-O-methoxyethyl modified 5-methylcytosine
  modified_base 2: mod_base = OTHER; note = 2'-O-methoxyethyl modified thymine
  modified_base 3: mod_base = OTHER; note = 2'-O-methoxyethyl modified 5-methylcytosine
  modified_base 4: mod_base = OTHER; note = 2'-O-methoxyethyl modified 5-methylcytosine
  modified_base 5: mod_base = OTHER; note = 2'-O-methoxyethyl modified 5-methylcytosine
  modified_base 6: mod_base = OTHER; note = 2'-O-methoxyethyl modified 5-methylcytosine
  modified_base 7: mod_base = OTHER; note = 2'-O-methoxyethyl modified 5-methylcytosine
  modified_base 8: mod_base = OTHER; note = 2'-O-methoxyethyl modified thymine
  modified_base 9: mod_base = OTHER; note = 2'-O-methoxyethyl modified nucleotide
  modified_base 10: mod_base = OTHER; note = 2'-O-methoxyethyl modified thymine
  modified_base 11: mod_base = OTHER; note = 2'-O-methoxyethyl modified nucleotide
  modified_base 12: mod_base = OTHER; note = 2'-O-methoxyethyl modified thymine
  modified_base 13: mod_base = OTHER; note = 2'-O-methoxyethyl modified 5-methylcytosine
  modified_base 14: mod_base = OTHER; note = 2'-O-methoxyethyl modified 5-methylcytosine
  modified_base 15: mod_base = OTHER; note = 2'-O-methoxyethyl modified thymine
  modified_base 16: mod_base = OTHER; note = 2'-O-methoxyethyl modified 5-methylcytosine
  modified_base 17: mod_base = OTHER; note = 2'-O-methoxyethyl modified 5-methylcytosine
  modified_base 18: mod_base = OTHER; note = 2'-O-methoxyethyl modified nucleotide
ctccccctgtgtcctccg

SEQ ID NO: 225 - RNA, 18 nt, synthetic construct
  source 1..18: mol_type = other RNA
  modified_base 1: mod_base = OTHER; note = 2'-O-methoxyethyl modified nucleotide
  modified_base 2: mod_base = OTHER; note = 2'-O-methoxyethyl modified thymine
  modified_base 3: mod_base = OTHER; note = 2'-O-methoxyethyl modified 5-methylcytosine
  modified_base 4: mod_base = OTHER; note = 2'-O-methoxyethyl modified nucleotide
  modified_base 5: mod_base = OTHER; note = 2'-O-methoxyethyl modified 5-methylcytosine
  modified_base 6: mod_base = OTHER; note = 2'-O-methoxyethyl modified 5-methylcytosine
  modified_base 7: mod_base = OTHER; note = 2'-O-methoxyethyl modified thymine
  modified_base 8: mod_base = OTHER; note = 2'-O-methoxyethyl modified 5-methylcytosine
  modified_base 9: mod_base = OTHER; note = 2'-O-methoxyethyl modified 5-methylcytosine
  modified_base 10: mod_base = OTHER; note = 2'-O-methoxyethyl modified 5-methylcytosine
  modified_base 11: mod_base = OTHER; note = 2'-O-methoxyethyl modified 5-methylcytosine
  modified_base 12: mod_base = OTHER; note = 2'-O-methoxyethyl modified 5-methylcytosine
  modified_base 13: mod_base = OTHER; note = 2'-O-methoxyethyl modified thymine
  modified_base 14: mod_base = OTHER; note = 2'-O-methoxyethyl modified nucleotide
  modified_base 15: mod_base = OTHER; note = 2'-O-methoxyethyl modified thymine
  modified_base 16: mod_base = OTHER; note = 2'-O-methoxyethyl modified nucleotide
  modified_base 17: mod_base = OTHER; note = 2'-O-methoxyethyl modified thymine
  modified_base 18: mod_base = OTHER; note = 2'-O-methoxyethyl modified 5-methylcytosine
gtcacctccccctgtgtc

SEQ ID NO: 226 - RNA, 18 nt, synthetic construct
  source 1..18: mol_type = other RNA
  modified_base 1: mod_base = OTHER; note = 2'-O-methoxyethyl modified 5-methylcytosine
  modified_base 2: mod_base = OTHER; note = 2'-O-methoxyethyl modified 5-methylcytosine
  modified_base 3: mod_base = OTHER; note = 2'-O-methoxyethyl modified nucleotide
  modified_base 4: mod_base = OTHER; note = 2'-O-methoxyethyl modified nucleotide
  modified_base 5: mod_base = OTHER; note = 2'-O-methoxyethyl modified nucleotide
  modified_base 6: mod_base = OTHER; note = 2'-O-methoxyethyl modified nucleotide
  modified_base 7: mod_base = OTHER; note = 2'-O-methoxyethyl modified thymine
  modified_base 8: mod_base = OTHER; note = 2'-O-methoxyethyl modified 5-methylcytosine
  modified_base 9: mod_base = OTHER; note = 2'-O-methoxyethyl modified nucleotide
  modified_base 10: mod_base = OTHER; note = 2'-O-methoxyethyl modified 5-methylcytosine
  modified_base 11: mod_base = OTHER; note = 2'-O-methoxyethyl modified 5-methylcytosine
  modified_base 12: mod_base = OTHER; note = 2'-O-methoxyethyl modified thymine
  modified_base 13: mod_base = OTHER; note = 2'-O-methoxyethyl modified 5-methylcytosine
  modified_base 14: mod_base = OTHER; note = 2'-O-methoxyethyl modified 5-methylcytosine
  modified_base 15: mod_base = OTHER; note = 2'-O-methoxyethyl modified 5-methylcytosine
  modified_base 16: mod_base = OTHER; note = 2'-O-methoxyethyl modified 5-methylcytosine
  modified_base 17: mod_base = OTHER; note = 2'-O-methoxyethyl modified 5-methylcytosine
  modified_base 18: mod_base = OTHER; note = 2'-O-methoxyethyl modified thymine
ccggagtcacctccccct

SEQ ID NO: 227 - RNA, 18 nt, synthetic construct
  source 1..18: mol_type = other RNA
  modified_base 1: mod_base = OTHER; note = 2'-O-methoxyethyl modified nucleotide
  modified_base 2: mod_base = OTHER; note = 2'-O-methoxyethyl modified thymine
  modified_base 3: mod_base = OTHER; note = 2'-O-methoxyethyl modified nucleotide
  modified_base 4: mod_base = OTHER; note = 2'-O-methoxyethyl modified nucleotide
  modified_base 5: mod_base = OTHER; note = 2'-O-methoxyethyl modified thymine
  modified_base 6: mod_base = OTHER; note = 2'-O-methoxyethyl modified 5-methylcytosine
  modified_base 7: mod_base = OTHER; note = 2'-O-methoxyethyl modified 5-methylcytosine
  modified_base 8: mod_base = OTHER; note = 2'-O-methoxyethyl modified nucleotide
  modified_base 9: mod_base = OTHER; note = 2'-O-methoxyethyl modified nucleotide
  modified_base 10: mod_base = OTHER; note = 2'-O-methoxyethyl modified nucleotide
  modified_base 11: mod_base = OTHER; note = 2'-O-methoxyethyl modified nucleotide
  modified_base 12: mod_base = OTHER; note = 2'-O-methoxyethyl modified thymine
  modified_base 13: mod_base = OTHER; note = 2'-O-methoxyethyl modified 5-methylcytosine
  modified_base 14: mod_base = OTHER; note = 2'-O-methoxyethyl modified nucleotide
  modified_base 15: mod_base = OTHER; note = 2'-O-methoxyethyl modified 5-methylcytosine
  modified_base 16: mod_base = OTHER; note = 2'-O-methoxyethyl modified 5-methylcytosine
  modified_base 17: mod_base = OTHER; note = 2'-O-methoxyethyl modified thymine
  modified_base 18: mod_base = OTHER; note = 2'-O-methoxyethyl modified 5-methylcytosine
gtggtccggagtcacctc

SEQ ID NO: 228 - RNA, 18 nt, synthetic construct
  source 1..18: mol_type = other RNA
  modified_base 1: mod_base = OTHER; note = 2'-O-methoxyethyl modified 5-methylcytosine
  modified_base 2: mod_base = OTHER; note = 2'-O-methoxyethyl modified thymine
  modified_base 3: mod_base = OTHER; note = 2'-O-methoxyethyl modified nucleotide
  modified_base 4: mod_base = OTHER; note = 2'-O-methoxyethyl modified 5-methylcytosine
  modified_base 5: mod_base = OTHER; note = 2'-O-methoxyethyl modified nucleotide
  modified_base 6: mod_base = OTHER; note = 2'-O-methoxyethyl modified nucleotide
  modified_base 7: mod_base = OTHER; note = 2'-O-methoxyethyl modified thymine
  modified_base 8: mod_base = OTHER; note = 2'-O-methoxyethyl modified nucleotide
  modified_base 9: mod_base = OTHER; note = 2'-O-methoxyethyl modified nucleotide
  modified_base 10: mod_base = OTHER; note = 2'-O-methoxyethyl modified thymine
  modified_base 11: mod_base = OTHER; note = 2'-O-methoxyethyl modified 5-methylcytosine
  modified_base 12: mod_base = OTHER; note = 2'-O-methoxyethyl modified 5-methylcytosine
  modified_base 13: mod_base = OTHER; note = 2'-O-methoxyethyl modified nucleotide
  modified_base 14: mod_base = OTHER; note = 2'-O-methoxyethyl modified nucleotide
  modified_base 15: mod_base = OTHER; note = 2'-O-methoxyethyl modified nucleotide
  modified_base 16: mod_base = OTHER; note = 2'-O-methoxyethyl modified nucleotide
  modified_base 17: mod_base = OTHER; note = 2'-O-methoxyethyl modified thymine
  modified_base 18: mod_base = OTHER; note = 2'-O-methoxyethyl modified 5-methylcytosine
ctgcagtggtccggagtc

SEQ ID NO: 229 - RNA, 18 nt, synthetic construct
  source 1..18: mol_type = other RNA
  modified_base 1: mod_base = OTHER; note = 2'-O-methoxyethyl modified nucleotide
  modified_base 2: mod_base = OTHER; note = 2'-O-methoxyethyl modified nucleotide
  modified_base 3: mod_base = OTHER; note = 2'-O-methoxyethyl modified 5-methylcytosine
  modified_base 4: mod_base = OTHER; note = 2'-O-methoxyethyl modified 5-methylcytosine
  modified_base 5: mod_base = OTHER; note = 2'-O-methoxyethyl modified thymine
  modified_base 6: mod_base = OTHER; note = 2'-O-methoxyethyl modified nucleotide
  modified_base 7: mod_base = OTHER; note = 2'-O-methoxyethyl modified 5-methylcytosine
  modified_base 8: mod_base = OTHER; note = 2'-O-methoxyethyl modified nucleotide
  modified_base 9: mod_base = OTHER; note = 2'-O-methoxyethyl modified nucleotide
  modified_base 10: mod_base = OTHER; note = 2'-O-methoxyethyl modified thymine
  modified_base 11: mod_base = OTHER; note = 2'-O-methoxyethyl modified nucleotide
  modified_base 12: mod_base = OTHER; note = 2'-O-methoxyethyl modified nucleotide
  modified_base 13: mod_base = OTHER; note = 2'-O-methoxyethyl modified thymine
  modified_base 14: mod_base = OTHER; note = 2'-O-methoxyethyl modified 5-methylcytosine
  modified_base 15: mod_base = OTHER; note = 2'-O-methoxyethyl modified 5-methylcytosine
  modified_base 16: mod_base = OTHER; note = 2'-O-methoxyethyl modified nucleotide
  modified_base 17: mod_base = OTHER; note = 2'-O-methoxyethyl modified nucleotide
  modified_base 18: mod_base = OTHER; note = 2'-O-methoxyethyl modified nucleotide
aacctgcagtggtccgga

SEQ ID NO: 230 - RNA, 18 nt, synthetic construct
  source 1..18: mol_type = other RNA
  modified_base 1: mod_base = OTHER; note = 2'-O-methoxyethyl modified 5-methylcytosine
  modified_base 2: mod_base = OTHER; note = 2'-O-methoxyethyl modified nucleotide
  modified_base 3: mod_base = OTHER; note = 2'-O-methoxyethyl modified nucleotide
  modified_base 4: mod_base = OTHER; note = 2'-O-methoxyethyl modified 5-methylcytosine
  modified_base 5: mod_base = OTHER; note = 2'-O-methoxyethyl modified 5-methylcytosine
  modified_base 6: mod_base = OTHER; note = 2'-O-methoxyethyl modified nucleotide
  modified_base 7: mod_base = OTHER; note = 2'-O-methoxyethyl modified nucleotide
  modified_base 8: mod_base = OTHER; note = 2'-O-methoxyethyl modified 5-methylcytosine
  modified_base 9: mod_base = OTHER; note = 2'-O-methoxyethyl modified 5-methylcytosine
  modified_base 10: mod_base = OTHER; note = 2'-O-methoxyethyl modified thymine
  modified_base 11: mod_base = OTHER; note = 2'-O-methoxyethyl modified nucleotide
  modified_base 12: mod_base = OTHER; note = 2'-O-methoxyethyl modified 5-methylcytosine
  modified_base 13: mod_base = OTHER; note = 2'-O-methoxyethyl modified nucleotide
  modified_base 14: mod_base = OTHER; note = 2'-O-methoxyethyl modified nucleotide
  modified_base 15: mod_base = OTHER; note = 2'-O-methoxyethyl modified thymine
  modified_base 16: mod_base = OTHER; note = 2'-O-methoxyethyl modified nucleotide
  modified_base 17: mod_base = OTHER; note = 2'-O-methoxyethyl modified nucleotide
  modified_base 18: mod_base = OTHER; note = 2'-O-methoxyethyl modified thymine
cgaccaacctgcagtggt

SEQ ID NO: 231 - RNA, 18 nt, synthetic construct
  source 1..18: mol_type = other RNA
  modified_base 1: mod_base = OTHER; note = 2'-O-methoxyethyl modified 5-methylcytosine
  modified_base 2: mod_base = OTHER; note = 2'-O-methoxyethyl modified thymine
  modified_base 3: mod_base = OTHER; note = 2'-O-methoxyethyl modified thymine
  modified_base 4: mod_base = OTHER; note = 2'-O-methoxyethyl modified 5-methylcytosine
  modified_base 5: mod_base = OTHER; note = 2'-O-methoxyethyl modified nucleotide
  modified_base 6: mod_base = OTHER; note = 2'-O-methoxyethyl modified 5-methylcytosine
  modified_base 7: mod_base = OTHER; note = 2'-O-methoxyethyl modified nucleotide
  modified_base 8: mod_base = OTHER; note = 2'-O-methoxyethyl modified nucleotide
  modified_base 9: mod_base = OTHER; note = 2'-O-methoxyethyl modified 5-methylcytosine
  modified_base 10: mod_base = OTHER; note = 2'-O-methoxyethyl modified 5-methylcytosine
  modified_base 11: mod_base = OTHER; note = 2'-O-methoxyethyl modified nucleotide
  modified_base 12: mod_base = OTHER; note = 2'-O-methoxyethyl modified nucleotide
  modified_base 13: mod_base = OTHER; note = 2'-O-methoxyethyl modified 5-methylcytosine
  modified_base 14: mod_base = OTHER; note = 2'-O-methoxyethyl modified 5-methylcytosine
  modified_base 15: mod_base = OTHER; note = 2'-O-methoxyethyl modified thymine
  modified_base 16: mod_base = OTHER; note = 2'-O-methoxyethyl modified nucleotide
  modified_base 17: mod_base = OTHER; note = 2'-O-methoxyethyl modified 5-methylcytosine
  modified_base 18: mod_base = OTHER; note = 2'-O-methoxyethyl modified nucleotide
cttcacgaccaacctgca

SEQ ID NO: 232 - RNA, 18 nt, synthetic construct
  source 1..18: mol_type = other RNA
  modified_base 1: mod_base = OTHER; note = 2'-O-methoxyethyl modified nucleotide
  modified_base 2: mod_base = OTHER; note = 2'-O-methoxyethyl modified thymine
  modified_base 3: mod_base = OTHER; note = 2'-O-methoxyethyl modified nucleotide
  modified_base 4: mod_base = OTHER; note = 2'-O-methoxyethyl modified nucleotide
  modified_base 5: mod_base = OTHER; note = 2'-O-methoxyethyl modified nucleotide
  modified_base 6: mod_base = OTHER; note = 2'-O-methoxyethyl modified 5-methylcytosine
  modified_base 7: mod_base = OTHER; note = 2'-O-methoxyethyl modified thymine
  modified_base 8: mod_base = OTHER; note = 2'-O-methoxyethyl modified thymine
  modified_base 9: mod_base = OTHER; note = 2'-O-methoxyethyl modified 5-methylcytosine
  modified_base 10: mod_base = OTHER; note = 2'-O-methoxyethyl modified nucleotide
  modified_base 11: mod_base = OTHER; note = 2'-O-methoxyethyl modified 5-methylcytosine
  modified_base 12: mod_base = OTHER; note = 2'-O-methoxyethyl modified nucleotide
  modified_base 13: mod_base = OTHER; note = 2'-O-methoxyethyl modified nucleotide
  modified_base 14: mod_base = OTHER; note = 2'-O-methoxyethyl modified 5-methylcytosine
  modified_base 15: mod_base = OTHER; note = 2'-O-methoxyethyl modified 5-methylcytosine
  modified_base 16: mod_base = OTHER; note = 2'-O-methoxyethyl modified nucleotide
  modified_base 17: mod_base = OTHER; note = 2'-O-methoxyethyl modified nucleotide
  modified_base 18: mod_base = OTHER; note = 2'-O-methoxyethyl modified 5-methylcytosine
gtgggcttcacgaccaac

SEQ ID NO: 233 - RNA, 18 nt, synthetic construct
  source 1..18: mol_type = other RNA
  modified_base 1: mod_base = OTHER; note = 2'-O-methoxyethyl modified nucleotide
  modified_base 2: mod_base = OTHER; note = 2'-O-methoxyethyl modified nucleotide
  modified_base 3: mod_base = OTHER; note = 2'-O-methoxyethyl modified nucleotide
  modified_base 4: mod_base = OTHER; note = 2'-O-methoxyethyl modified nucleotide
  modified_base 5: mod_base = OTHER; note = 2'-O-methoxyethyl modified nucleotide
  modified_base 6: mod_base = OTHER; note = 2'-O-methoxyethyl modified nucleotide
  modified_base 7: mod_base = OTHER; note = 2'-O-methoxyethyl modified thymine
  modified_base 8: mod_base = OTHER; note = 2'-O-methoxyethyl modified nucleotide
  modified_base 9: mod_base = OTHER; note = 2'-O-methoxyethyl modified nucleotide
  modified_base 10: mod_base = OTHER; note = 2'-O-methoxyethyl modified nucleotide
  modified_base 11: mod_base = OTHER; note = 2'-O-methoxyethyl modified 5-methylcytosine
  modified_base 12: mod_base = OTHER; note = 2'-O-methoxyethyl modified thymine
  modified_base 13: mod_base = OTHER; note = 2'-O-methoxyethyl modified thymine
  modified_base 14: mod_base = OTHER; note = 2'-O-methoxyethyl modified 5-methylcytosine
  modified_base 15: mod_base = OTHER; note = 2'-O-methoxyethyl modified nucleotide
  modified_base 16: mod_base = OTHER; note = 2'-O-methoxyethyl modified 5-methylcytosine
  modified_base 17: mod_base = OTHER; note = 2'-O-methoxyethyl modified nucleotide
  modified_base 18: mod_base = OTHER; note = 2'-O-methoxyethyl modified nucleotide
agggagtgggcttcacga

SEQ ID NO: 234 - RNA, 18 nt, synthetic construct
  source 1..18: mol_type = other RNA
  modified_base 1: mod_base = OTHER; note = 2'-O-methoxyethyl modified nucleotide
  modified_base 2: mod_base = OTHER; note = 2'-O-methoxyethyl modified thymine
  modified_base 3: mod_base = OTHER; note = 2'-O-methoxyethyl modified thymine
  modified_base 4: mod_base = OTHER; note = 2'-O-methoxyethyl modified nucleotide
  modified_base 5: mod_base = OTHER; note = 2'-O-methoxyethyl modified nucleotide
  modified_base 6: mod_base = OTHER; note = 2'-O-methoxyethyl modified nucleotide
  modified_base 7: mod_base = OTHER; note = 2'-O-methoxyethyl modified nucleotide
  modified_base 8: mod_base = OTHER; note = 2'-O-methoxyethyl modified nucleotide
  modified_base 9: mod_base = OTHER; note = 2'-O-methoxyethyl modified nucleotide
  modified_base 10: mod_base = OTHER; note = 2'-O-methoxyethyl modified nucleotide
  modified_base 11: mod_base = OTHER; note = 2'-O-methoxyethyl modified nucleotide
  modified_base 12: mod_base = OTHER; note = 2'-O-methoxyethyl modified thymine
  modified_base 13: mod_base = OTHER; note = 2'-O-methoxyethyl modified nucleotide
  modified_base 14: mod_base = OTHER; note = 2'-O-methoxyethyl modified nucleotide
  modified_base 15: mod_base = OTHER; note = 2'-O-methoxyethyl modified nucleotide
  modified_base 16: mod_base = OTHER; note = 2'-O-methoxyethyl modified 5-methylcytosine
  modified_base 17: mod_base = OTHER; note = 2'-O-methoxyethyl modified thymine
  modified_base 18: mod_base = OTHER; note = 2'-O-methoxyethyl modified thymine
gttggagggagtgggctt

SEQ ID NO: 235 - RNA, 18 nt, synthetic construct
  source 1..18: mol_type = other RNA
  modified_base 1: mod_base = OTHER; note = 2'-O-methoxyethyl modified nucleotide
  modified_base 2: mod_base = OTHER; note = 2'-O-methoxyethyl modified nucleotide
  modified_base 3: mod_base = OTHER; note = 2'-O-methoxyethyl modified nucleotide
  modified_base 4: mod_base = OTHER; note = 2'-O-methoxyethyl modified nucleotide
  modified_base 5: mod_base = OTHER; note = 2'-O-methoxyethyl modified thymine
  modified_base 6: mod_base = OTHER; note = 2'-O-methoxyethyl modified nucleotide
  modified_base 7: mod_base = OTHER; note = 2'-O-methoxyethyl modified thymine
  modified_base 8: mod_base = OTHER; note = 2'-O-methoxyethyl modified thymine
  modified_base 9: mod_base = OTHER; note = 2'-O-methoxyethyl modified nucleotide
  modified_base 10: mod_base = OTHER; note = 2'-O-methoxyethyl modified nucleotide
  modified_base 11: mod_base = OTHER; note = 2'-O-methoxyethyl modified nucleotide
  modified_base 12: mod_base = OTHER; note = 2'-O-methoxyethyl modified nucleotide
  modified_base 13: mod_base = OTHER; note = 2'-O-methoxyethyl modified nucleotide
  modified_base 14: mod_base = OTHER; note = 2'-O-methoxyethyl modified nucleotide
  modified_base 15: mod_base = OTHER; note = 2'-O-methoxyethyl modified nucleotide
  modified_base 16: mod_base = OTHER; note = 2'-O-methoxyethyl modified nucleotide
  modified_base 17: mod_base = OTHER; note = 2'-O-methoxyethyl modified thymine
  modified_base 18: mod_base = OTHER; note = 2'-O-methoxyethyl modified nucleotide
gaggtgttggagggagtg

SEQ ID NO: 236 - RNA, 18 nt, synthetic construct
  source 1..18: mol_type = other RNA
  modified_base 1: mod_base = OTHER; note = 2'-O-methoxyethyl modified 5-methylcytosine
  modified_base 2: mod_base = OTHER; note = 2'-O-methoxyethyl modified thymine
  modified_base 3: mod_base = OTHER; note = 2'-O-methoxyethyl modified 5-methylcytosine
  modified_base 4: mod_base = OTHER; note = 2'-O-methoxyethyl modified 5-methylcytosine
  modified_base 5: mod_base = OTHER; note = 2'-O-methoxyethyl modified nucleotide
  modified_base 6: mod_base = OTHER; note = 2'-O-methoxyethyl modified nucleotide
  modified_base 7: mod_base = OTHER; note = 2'-O-methoxyethyl modified nucleotide
  modified_base 8: mod_base = OTHER; note = 2'-O-methoxyethyl modified nucleotide
  modified_base 9: mod_base = OTHER; note = 2'-O-methoxyethyl modified nucleotide
  modified_base 10: mod_base = OTHER; note = 2'-O-methoxyethyl modified thymine
  modified_base 11: mod_base = OTHER; note = 2'-O-methoxyethyl modified nucleotide
  modified_base 12: mod_base = OTHER; note = 2'-O-methoxyethyl modified thymine
  modified_base 13: mod_base = OTHER; note = 2'-O-methoxyethyl modified thymine
  modified_base 14: mod_base = OTHER; note = 2'-O-methoxyethyl modified nucleotide
  modified_base 15: mod_base = OTHER; note = 2'-O-methoxyethyl modified nucleotide
  modified_base 16: mod_base = OTHER; note = 2'-O-methoxyethyl modified nucleotide
  modified_base 17: mod_base = OTHER; note = 2'-O-methoxyethyl modified nucleotide
  modified_base 18: mod_base = OTHER; note = 2'-O-methoxyethyl modified nucleotide
ctccggaggtgttggagg

SEQ ID NO: 237 - RNA, 18 nt, synthetic construct
  source 1..18: mol_type = other RNA
  modified_base 1: mod_base = OTHER; note = 2'-O-methoxyethyl modified nucleotide
  modified_base 2: mod_base = OTHER; note = 2'-O-methoxyethyl modified nucleotide
  modified_base 3: mod_base = OTHER; note = 2'-O-methoxyethyl modified nucleotide
  modified_base 4: mod_base = OTHER; note = 2'-O-methoxyethyl modified nucleotide
  modified_base 5: mod_base = OTHER; note = 2'-O-methoxyethyl modified nucleotide
  modified_base 6: mod_base = OTHER; note = 2'-O-methoxyethyl modified 5-methylcytosine
  modified_base 7: mod_base = OTHER; note = 2'-O-methoxyethyl modified thymine
  modified_base 8: mod_base = OTHER; note = 2'-O-methoxyethyl modified 5-methylcytosine
  modified_base 9: mod_base = OTHER; note = 2'-O-methoxyethyl modified 5-methylcytosine
  modified_base 10: mod_base = OTHER; note = 2'-O-methoxyethyl modified nucleotide
  modified_base 11: mod_base = OTHER; note = 2'-O-methoxyethyl modified nucleotide
  modified_base 12: mod_base = OTHER; note = 2'-O-methoxyethyl modified nucleotide
  modified_base 13: mod_base = OTHER; note = 2'-O-methoxyethyl modified nucleotide
  modified_base 14: mod_base = OTHER; note = 2'-O-methoxyethyl modified nucleotide
  modified_base 15: mod_base = OTHER; note = 2'-O-methoxyethyl modified thymine
  modified_base 16: mod_base = OTHER; note = 2'-O-methoxyethyl modified nucleotide
  modified_base 17: mod_base = OTHER; note = 2'-O-methoxyethyl modified thymine
  modified_base 18: mod_base = OTHER; note = 2'-O-methoxyethyl modified thymine
agaggctccggaggtgtt

SEQ ID NO: 238 - RNA, 18 nt, synthetic construct
  source 1..18: mol_type = other RNA
  modified_base 1: mod_base = OTHER; note = 2'-O-methoxyethyl modified nucleotide
  modified_base 2: mod_base = OTHER; note = 2'-O-methoxyethyl modified nucleotide
  modified_base 3: mod_base = OTHER; note = 2'-O-methoxyethyl modified nucleotide
  modified_base 4: mod_base = OTHER; note = 2'-O-methoxyethyl modified nucleotide
  modified_base 5: mod_base = OTHER; note = 2'-O-methoxyethyl modified nucleotide
  modified_base 6: mod_base = OTHER; note = 2'-O-methoxyethyl modified nucleotide
  modified_base 7: mod_base = OTHER; note = 2'-O-methoxyethyl modified nucleotide
  modified_base 8: mod_base = OTHER; note = 2'-O-methoxyethyl modified nucleotide
  modified_base 9: mod_base = OTHER; note = 2'-O-methoxyethyl modified nucleotide
  modified_base 10: mod_base = OTHER; note = 2'-O-methoxyethyl modified nucleotide
  modified_base 11: mod_base = OTHER; note = 2'-O-methoxyethyl modified 5-methylcytosine
  modified_base 12: mod_base = OTHER; note = 2'-O-methoxyethyl modified thymine
  modified_base 13: mod_base = OTHER; note = 2'-O-methoxyethyl modified 5-methylcytosine
  modified_base 14: mod_base = OTHER; note = 2'-O-methoxyethyl modified 5-methylcytosine
  modified_base 15: mod_base = OTHER; note = 2'-O-methoxyethyl modified nucleotide
  modified_base 16: mod_base = OTHER; note = 2'-O-methoxyethyl modified nucleotide
  modified_base 17: mod_base = OTHER; note = 2'-O-methoxyethyl modified nucleotide
  modified_base 18: mod_base = OTHER; note = 2'-O-methoxyethyl modified nucleotide
aggggagaggctccggag

SEQ ID NO: 239 - RNA, 18 nt, synthetic construct
  source 1..18: mol_type = other RNA
  modified_base 1: mod_base = OTHER; note = 2'-O-methoxyethyl modified nucleotide
  modified_base 2: mod_base = OTHER; note = 2'-O-methoxyethyl modified thymine
  modified_base 3: mod_base = OTHER; note = 2'-O-methoxyethyl modified nucleotide
  modified_base 4: mod_base = OTHER; note = 2'-O-methoxyethyl modified nucleotide
  modified_base 5: mod_base = OTHER; note = 2'-O-methoxyethyl modified nucleotide
  modified_base 6: mod_base = OTHER; note = 2'-O-methoxyethyl modified nucleotide
  modified_base 7: mod_base = OTHER; note = 2'-O-methoxyethyl modified nucleotide
  modified_base 8: mod_base = OTHER; note = 2'-O-methoxyethyl modified nucleotide
  modified_base 9: mod_base = OTHER; note = 2'-O-methoxyethyl modified nucleotide
  modified_base 10: mod_base = OTHER; note = 2'-O-methoxyethyl modified nucleotide
  modified_base 11: mod_base = OTHER; note = 2'-O-methoxyethyl modified nucleotide
  modified_base 12: mod_base = OTHER; note = 2'-O-methoxyethyl modified nucleotide
  modified_base 13: mod_base = OTHER; note = 2'-O-methoxyethyl modified nucleotide
  modified_base 14: mod_base = OTHER; note = 2'-O-methoxyethyl modified nucleotide
  modified_base 15: mod_base = OTHER; note = 2'-O-methoxyethyl modified nucleotide
  modified_base 16: mod_base = OTHER; note = 2'-O-methoxyethyl modified 5-methylcytosine
  modified_base 17: mod_base = OTHER; note = 2'-O-methoxyethyl modified thymine
  modified_base 18: mod_base = OTHER; note = 2'-O-methoxyethyl modified 5-methylcytosine
gtgagaggggagaggctc

SEQ ID NO: 240 - RNA, 18 nt, synthetic construct
  source 1..18: mol_type = other RNA
  modified_base 1: mod_base = OTHER; note = 2'-O-methoxyethyl modified 5-methylcytosine
  modified_base 2: mod_base = OTHER; note = 2'-O-methoxyethyl modified nucleotide
  modified_base 3: mod_base = OTHER; note = 2'-O-methoxyethyl modified nucleotide
  modified_base 4: mod_base = OTHER; note = 2'-O-methoxyethyl modified 5-methylcytosine
  modified_base 5: mod_base = OTHER; note = 2'-O-methoxyethyl modified nucleotide
  modified_base 6: mod_base = OTHER; note = 2'-O-methoxyethyl modified nucleotide
  modified_base 7: mod_base = OTHER; note = 2'-O-methoxyethyl modified thymine
  modified_base 8: mod_base = OTHER; note = 2'-O-methoxyethyl modified nucleotide
  modified_base 9: mod_base = OTHER; note = 2'-O-methoxyethyl modified nucleotide
  modified_base 10: mod_base = OTHER; note = 2'-O-methoxyethyl modified nucleotide
  modified_base 11: mod_base = OTHER; note = 2'-O-methoxyethyl modified nucleotide
  modified_base 12: mod_base = OTHER; note = 2'-O-methoxyethyl modified nucleotide
  modified_base 13: mod_base = OTHER; note = 2'-O-methoxyethyl modified nucleotide
  modified_base 14: mod_base = OTHER; note = 2'-O-methoxyethyl modified nucleotide
  modified_base 15: mod_base = OTHER; note = 2'-O-methoxyethyl modified nucleotide
  modified_base 16: mod_base = OTHER; note = 2'-O-methoxyethyl modified nucleotide
  modified_base 17: mod_base = OTHER; note = 2'-O-methoxyethyl modified nucleotide
  modified_base 18: mod_base = OTHER; note = 2'-O-methoxyethyl modified nucleotide
cagcagtgagaggggaga

SEQ ID NO: 241 - RNA, 18 nt, synthetic construct
  source 1..18: mol_type = other RNA
  modified_base 1: mod_base = OTHER; note = 2'-O-methoxyethyl modified nucleotide
  modified_base 2: mod_base = OTHER; note = 2'-O-methoxyethyl modified nucleotide
  modified_base 3: mod_base = OTHER; note = 2'-O-methoxyethyl modified nucleotide
  modified_base 4: mod_base = OTHER; note = 2'-O-methoxyethyl modified nucleotide
  modified_base 5: mod_base = OTHER; note = 2'-O-methoxyethyl modified nucleotide
  modified_base 6: mod_base = OTHER; note = 2'-O-methoxyethyl modified 5-methylcytosine
  modified_base 7: mod_base = OTHER; note = 2'-O-methoxyethyl modified nucleotide
  modified_base 8: mod_base = OTHER; note = 2'-O-methoxyethyl modified nucleotide
  modified_base 9: mod_base = OTHER; note = 2'-O-methoxyethyl modified 5-methylcytosine
  modified_base 10: mod_base = OTHER; note = 2'-O-methoxyethyl modified nucleotide
  modified_base 11: mod_base = OTHER; note = 2'-O-methoxyethyl modified nucleotide
  modified_base 12: mod_base = OTHER; note = 2'-O-methoxyethyl modified thymine
  modified_base 13: mod_base = OTHER; note = 2'-O-methoxyethyl modified nucleotide
  modified_base 14: mod_base = OTHER; note = 2'-O-methoxyethyl modified nucleotide
  modified_base 15: mod_base = OTHER; note = 2'-O-methoxyethyl modified nucleotide
  modified_base 16: mod_base = OTHER; note = 2'-O-methoxyethyl modified nucleotide
  modified_base 17: mod_base = OTHER; note = 2'-O-methoxyethyl modified nucleotide
  modified_base 18: mod_base = OTHER; note = 2'-O-methoxyethyl modified nucleotide
gagggcagcagtgagagg

SEQ ID NO: 242 - RNA, 18 nt, synthetic construct
  source 1..18: mol_type = other RNA
  modified_base 1: mod_base = OTHER; note = 2'-O-methoxyethyl modified nucleotide
  modified_base 2: mod_base = OTHER; note = 2'-O-methoxyethyl modified thymine
  modified_base 3: mod_base = OTHER; note = 2'-O-methoxyethyl modified nucleotide
  modified_base 4: mod_base = OTHER; note = 2'-O-methoxyethyl modified thymine
  modified_base 5: mod_base = OTHER; note = 2'-O-methoxyethyl modified nucleotide
  modified_base 6: mod_base = OTHER; note = 2'-O-methoxyethyl modified nucleotide
  modified_base 7: mod_base = OTHER; note = 2'-O-methoxyethyl modified nucleotide
  modified_base 8: mod_base = OTHER; note = 2'-O-methoxyethyl modified nucleotide
  modified_base 9: mod_base = OTHER; note = 2'-O-methoxyethyl modified nucleotide
  modified_base 10: mod_base = OTHER; note = 2'-O-methoxyethyl modified nucleotide
  modified_base 11: mod_base = OTHER; note = 2'-O-methoxyethyl modified 5-methylcytosine
  modified_base 12: mod_base = OTHER; note = 2'-O-methoxyethyl modified nucleotide
  modified_base 13: mod_base = OTHER; note = 2'-O-methoxyethyl modified nucleotide
  modified_base 14: mod_base = OTHER; note = 2'-O-methoxyethyl modified 5-methylcytosine
  modified_base 15: mod_base = OTHER; note = 2'-O-methoxyethyl modified nucleotide
  modified_base 16: mod_base = OTHER; note = 2'-O-methoxyethyl modified nucleotide
  modified_base 17: mod_base = OTHER; note = 2'-O-methoxyethyl modified thymine
  modified_base 18: mod_base = OTHER; note = 2'-O-methoxyethyl modified nucleotide
gtgtggagggcagcagtg

SEQ ID NO: 243 - RNA, 18 nt, synthetic construct
  source 1..18: mol_type = other RNA
  modified_base 1: mod_base = OTHER; note = 2'-O-methoxyethyl modified thymine
  modified_base 2: mod_base = OTHER; note = 2'-O-methoxyethyl modified 5-methylcytosine
  modified_base 3: mod_base = OTHER; note = 2'-O-methoxyethyl modified thymine
  modified_base 4: mod_base = OTHER; note = 2'-O-methoxyethyl modified nucleotide
  modified_base 5: mod_base = OTHER; note = 2'-O-methoxyethyl modified nucleotide
  modified_base 6: mod_base = OTHER; note = 2'-O-methoxyethyl modified nucleotide
  modified_base 7: mod_base = OTHER; note = 2'-O-methoxyethyl modified thymine
  modified_base 8: mod_base = OTHER; note = 2'-O-methoxyethyl modified nucleotide
  modified_base 9: mod_base = OTHER; note = 2'-O-methoxyethyl modified thymine
  modified_base 10: mod_base = OTHER; note = 2'-O-methoxyethyl modified nucleotide
  modified_base 11: mod_base = OTHER; note = 2'-O-methoxyethyl modified nucleotide
  modified_base 12: mod_base = OTHER; note = 2'-O-methoxyethyl modified nucleotide
  modified_base 13: mod_base = OTHER; note = 2'-O-methoxyethyl modified nucleotide
  modified_base 14: mod_base = OTHER; note = 2'-O-methoxyethyl modified nucleotide
  modified_base 15: mod_base = OTHER; note = 2'-O-methoxyethyl modified nucleotide
  modified_base 16: mod_base = OTHER; note = 2'-O-methoxyethyl modified 5-methylcytosine
  modified_base 17: mod_base = OTHER; note = 2'-O-methoxyethyl modified nucleotide
  modified_base 18: mod_base = OTHER; note = 2'-O-methoxyethyl modified nucleotide
tctgggtgtggagggcag

SEQ ID NO: 244 - RNA, 18 nt, synthetic construct
  source 1..18: mol_type = other RNA
  modified_base 1: mod_base = OTHER; note = 2'-O-methoxyethyl modified nucleotide
  modified_base 2: mod_base = OTHER; note = 2'-O-methoxyethyl modified nucleotide
  modified_base 3: mod_base = OTHER; note = 2'-O-methoxyethyl modified thymine
  modified_base 4: mod_base = OTHER; note = 2'-O-methoxyethyl modified thymine
  modified_base 5: mod_base = OTHER; note = 2'-O-methoxyethyl modified 5-methylcytosine
  modified_base 6: mod_base = OTHER; note = 2'-O-methoxyethyl modified thymine
  modified_base 7: mod_base = OTHER; note = 2'-O-methoxyethyl modified 5-methylcytosine
  modified_base 8: mod_base = OTHER; note = 2'-O-methoxyethyl modified thymine
  modified_base 9: mod_base = OTHER; note = 2'-O-methoxyethyl modified nucleotide
  modified_base 10: mod_base = OTHER; note = 2'-O-methoxyethyl modified nucleotide
  modified_base 11: mod_base = OTHER; note = 2'-O-methoxyethyl modified nucleotide
  modified_base 12: mod_base = OTHER; note = 2'-O-methoxyethyl modified thymine
  modified_base 13: mod_base = OTHER; note = 2'-O-methoxyethyl modified nucleotide
  modified_base 14: mod_base = OTHER; note = 2'-O-methoxyethyl modified thymine
  modified_base 15: mod_base = OTHER; note = 2'-O-methoxyethyl modified nucleotide
  modified_base 16: mod_base = OTHER; note = 2'-O-methoxyethyl modified nucleotide
  modified_base 17: mod_base = OTHER; note = 2'-O-methoxyethyl modified nucleotide
  modified_base 18: mod_base = OTHER; note = 2'-O-methoxyethyl modified nucleotide
ggttctctgggtgtggag

SEQ ID NO: 245 - RNA, 18 nt, synthetic construct
  source 1..18: mol_type = other RNA
  modified_base 1: mod_base = OTHER; note = 2'-O-methoxyethyl modified nucleotide
  modified_base 2: mod_base = OTHER; note = 2'-O-methoxyethyl modified thymine
  modified_base 3: mod_base = OTHER; note = 2'-O-methoxyethyl modified nucleotide
  modified_base 4: mod_base = OTHER; note = 2'-O-methoxyethyl modified nucleotide
  modified_base 5: mod_base = OTHER; note = 2'-O-methoxyethyl modified nucleotide
  modified_base 6: mod_base = OTHER; note = 2'-O-methoxyethyl modified nucleotide
  modified_base 7: mod_base = OTHER; note = 2'-O-methoxyethyl modified nucleotide
  modified_base 8: mod_base = OTHER; note = 2'-O-methoxyethyl modified thymine
  modified_base 9: mod_base = OTHER; note = 2'-O-methoxyethyl modified thymine
  modified_base 10: mod_base = OTHER; note = 2'-O-methoxyethyl modified 5-methylcytosine
  modified_base 11: mod_base = OTHER; note = 2'-O-methoxyethyl modified thymine
  modified_base 12: mod_base = OTHER; note = 2'-O-methoxyethyl modified 5-methylcytosine
  modified_base 13: mod_base = OTHER; note = 2'-O-methoxyethyl modified thymine
  modified_base 14: mod_base = OTHER; note = 2'-O-methoxyethyl modified nucleotide
  modified_base 15: mod_base = OTHER; note = 2'-O-methoxyethyl modified nucleotide
  modified_base 16: mod_base = OTHER; note = 2'-O-methoxyethyl modified nucleotide
  modified_base 17: mod_base = OTHER; note = 2'-O-methoxyethyl modified thymine
  modified_base 18: mod_base = OTHER; note = 2'-O-methoxyethyl modified nucleotide
gtggaggttctctgggtg

SEQ ID NO: 246 - RNA, 18 nt, synthetic construct
  source 1..18: mol_type = other RNA
  modified_base 1: mod_base = OTHER; note = 2'-O-methoxyethyl modified nucleotide
  modified_base 2: mod_base = OTHER; note = 2'-O-methoxyethyl modified nucleotide
  modified_base 3: mod_base = OTHER; note = 2'-O-methoxyethyl modified thymine
  modified_base 4: mod_base = OTHER; note = 2'-O-methoxyethyl modified 5-methylcytosine
  modified_base 5: mod_base = OTHER; note = 2'-O-methoxyethyl modified thymine
  modified_base 6: mod_base = OTHER; note = 2'-O-methoxyethyl modified nucleotide
  modified_base 7: mod_base = OTHER; note = 2'-O-methoxyethyl modified thymine
  modified_base 8: mod_base = OTHER; note = 2'-O-methoxyethyl modified nucleotide
  modified_base 9: mod_base = OTHER; note = 2'-O-methoxyethyl modified nucleotide
  modified_base 10: mod_base = OTHER; note = 2'-O-methoxyethyl modified nucleotide
  modified_base 11: mod_base = OTHER; note = 2'-O-methoxyethyl modified nucleotide
  modified_base 12: mod_base = OTHER; note = 2'-O-methoxyethyl modified nucleotide
  modified_base 13: mod_base = OTHER; note = 2'-O-methoxyethyl modified thymine
  modified_base 14: mod_base = OTHER; note = 2'-O-methoxyethyl modified thymine
  modified_base 15: mod_base = OTHER; note = 2'-O-methoxyethyl modified 5-methylcytosine
  modified_base 16: mod_base = OTHER; note = 2'-O-methoxyethyl modified thymine
  modified_base 17: mod_base = OTHER; note = 2'-O-methoxyethyl modified 5-methylcytosine
  modified_base 18: mod_base = OTHER; note = 2'-O-methoxyethyl modified thymine
agtctgtggaggttctct

SEQ ID NO: 247 - RNA, 18 nt, synthetic construct
  source 1..18: mol_type = other RNA
  modified_base 1: mod_base = OTHER; note = 2'-O-methoxyethyl modified nucleotide
  modified_base 2: mod_base = OTHER; note = 2'-O-methoxyethyl modified 5-methylcytosine
  modified_base 3: mod_base = OTHER; note = 2'-O-methoxyethyl modified thymine
  modified_base 4: mod_base = OTHER; note = 2'-O-methoxyethyl modified nucleotide
  modified_base 5: mod_base = OTHER; note = 2'-O-methoxyethyl modified nucleotide
  modified_base 6: mod_base = OTHER; note = 2'-O-methoxyethyl modified nucleotide
  modified_base 7: mod_base = OTHER; note = 2'-O-methoxyethyl modified nucleotide
  modified_base 8: mod_base = OTHER; note = 2'-O-methoxyethyl modified thymine
  modified_base 9: mod_base = OTHER; note = 2'-O-methoxyethyl modified 5-methylcytosine
  modified_base 10: mod_base = OTHER; note = 2'-O-methoxyethyl modified thymine
  modified_base 11: mod_base = OTHER; note = 2'-O-methoxyethyl modified nucleotide
  modified_base 12: mod_base = OTHER; note = 2'-O-methoxyethyl modified thymine
  modified_base 13: mod_base = OTHER; note = 2'-O-methoxyethyl modified nucleotide
  modified_base 14: mod_base = OTHER; note = 2'-O-methoxyethyl modified nucleotide
  modified_base 15: mod_base = OTHER; note = 2'-O-methoxyethyl modified nucleotide
  modified_base 16: mod_base = OTHER; note = 2'-O-methoxyethyl modified nucleotide
  modified_base 17: mod_base = OTHER; note = 2'-O-methoxyethyl modified nucleotide
  modified_base 18: mod_base = OTHER; note = 2'-O-methoxyethyl modified thymine
gctggagtctgtggaggt

SEQ ID NO: 248 - RNA, 18 nt, synthetic construct
  source 1..18: mol_type = other RNA
  modified_base 1: mod_base = OTHER; note = 2'-O-methoxyethyl modified nucleotide
  modified_base 2: mod_base = OTHER; note = 2'-O-methoxyethyl modified nucleotide
  modified_base 3: mod_base = OTHER; note = 2'-O-methoxyethyl modified nucleotide
  modified_base 4: mod_base = OTHER; note = 2'-O-methoxyethyl modified nucleotide
  modified_base 5: mod_base = OTHER; note = 2'-O-methoxyethyl modified nucleotide
  modified_base 6: mod_base = OTHER; note = 2'-O-methoxyethyl modified nucleotide
  modified_base 7: mod_base = OTHER; note = 2'-O-methoxyethyl modified 5-methylcytosine
  modified_base 8: mod_base = OTHER; note = 2'-O-methoxyethyl modified thymine
  modified_base 9: mod_base = OTHER; note = 2'-O-methoxyethyl modified nucleotide
  modified_base 10: mod_base = OTHER; note = 2'-O-methoxyethyl modified nucleotide
  modified_base 11: mod_base = OTHER; note = 2'-O-methoxyethyl modified nucleotide
  modified_base 12: mod_base = OTHER; note = 2'-O-methoxyethyl modified nucleotide
  modified_base 13: mod_base = OTHER; note = 2'-O-methoxyethyl modified thymine
  modified_base 14: mod_base = OTHER; note = 2'-O-methoxyethyl modified 5-methylcytosine
  modified_base 15: mod_base = OTHER; note = 2'-O-methoxyethyl modified thymine
  modified_base 16: mod_base = OTHER; note = 2'-O-methoxyethyl modified nucleotide
  modified_base 17: mod_base = OTHER; note = 2'-O-methoxyethyl modified thymine
  modified_base 18: mod_base = OTHER; note = 2'-O-methoxyethyl modified nucleotide
ggagggctggagtctgtg

SEQ ID NO: 249 - RNA, 18 nt, synthetic construct
  source 1..18: mol_type = other RNA
  modified_base 1: mod_base = OTHER; note = 2'-O-methoxyethyl modified nucleotide
  modified_base 2: mod_base = OTHER; note = 2'-O-methoxyethyl modified thymine
  modified_base 3: mod_base = OTHER; note = 2'-O-methoxyethyl modified nucleotide
  modified_base 4: mod_base = OTHER; note = 2'-O-methoxyethyl modified thymine
  modified_base 5: mod_base = OTHER; note = 2'-O-methoxyethyl modified 5-methylcytosine
  modified_base 6: mod_base = OTHER; note = 2'-O-methoxyethyl modified nucleotide
  modified_base 7: mod_base = OTHER; note = 2'-O-methoxyethyl modified nucleotide
  modified_base 8: mod_base = OTHER; note = 2'-O-methoxyethyl modified nucleotide
  modified_base 9: mod_base = OTHER; note = 2'-O-methoxyethyl modified nucleotide
  modified_base 10: mod_base = OTHER; note = 2'-O-methoxyethyl modified nucleotide
  modified_base 11: mod_base = OTHER; note = 2'-O-methoxyethyl modified nucleotide
  modified_base 12: mod_base = OTHER; note = 2'-O-methoxyethyl modified 5-methylcytosine
  modified_base 13: mod_base = OTHER; note = 2'-O-methoxyethyl modified thymine
  modified_base 14: mod_base = OTHER; note = 2'-O-methoxyethyl modified nucleotide
  modified_base 15: mod_base = OTHER; note = 2'-O-methoxyethyl modified nucleotide
  modified_base 16: mod_base = OTHER; note = 2'-O-methoxyethyl modified nucleotide
  modified_base 17: mod_base = OTHER; note = 2'-O-methoxyethyl modified nucleotide
  modified_base 18: mod_base = OTHER; note = 2'-O-methoxyethyl modified thymine
gtgtcggagggctggagt

SEQ ID NO: 250 - RNA, 13 nt, synthetic construct
  source 1..13: mol_type = other RNA
  modified_base 1: mod_base = OTHER; note = 2'-O-methoxyethyl modified nucleotide
  modified_base 2: mod_base = OTHER; note = 2'-O-methoxyethyl modified nucleotide
  modified_base 3: mod_base = OTHER; note = 2'-O-methoxyethyl modified nucleotide
  modified_base 4: mod_base = OTHER; note = 2'-O-methoxyethyl modified nucleotide
  modified_base 5: mod_base = OTHER; note = 2'-O-methoxyethyl modified 5-methylcytosine
  modified_base 6: mod_base = OTHER; note = 2'-O-methoxyethyl modified nucleotide
  modified_base 7: mod_base = OTHER; note = 2'-O-methoxyethyl modified nucleotide
  modified_base 8: mod_base = OTHER; note = 2'-O-methoxyethyl modified nucleotide
  modified_base 9: mod_base = OTHER; note = 2'-O-methoxyethyl modified nucleotide
  modified_base 10: mod_base = OTHER; note = 2'-O-methoxyethyl modified 5-methylcytosine
  modified_base 11: mod_base = OTHER; note = 2'-O-methoxyethyl modified 5-methylcytosine
  modified_base 12: mod_base = OTHER; note = 2'-O-methoxyethyl modified nucleotide
  modified_base 13: mod_base = OTHER; note = 2'-O-methoxyethyl modified nucleotide
aaagcggaaccag

SEQ ID NO: 251 - RNA, 14 nt, synthetic construct
  source 1..14: mol_type = other RNA
  modified_base 1: mod_base = OTHER; note = 2'-O-methoxyethyl modified 5-methylcytosine
  modified_base 2: mod_base = OTHER; note = 2'-O-methoxyethyl modified nucleotide
  modified_base 3: mod_base = OTHER; note = 2'-O-methoxyethyl modified nucleotide
  modified_base 4: mod_base = OTHER; note = 2'-O-methoxyethyl modified nucleotide
  modified_base 5: mod_base = OTHER; note = 2'-O-methoxyethyl modified nucleotide
  modified_base 6: mod_base = OTHER; note = 2'-O-methoxyethyl modified 5-methylcytosine
  modified_base 7: mod_base = OTHER; note = 2'-O-methoxyethyl modified nucleotide
  modified_base 8: mod_base = OTHER; note = 2'-O-methoxyethyl modified nucleotide
  modified_base 9: mod_base = OTHER; note = 2'-O-methoxyethyl modified nucleotide
  modified_base 10: mod_base = OTHER; note = 2'-O-methoxyethyl modified nucleotide
  modified_base 11: mod_base = OTHER; note = 2'-O-methoxyethyl modified 5-methylcytosine
  modified_base 12: mod_base = OTHER; note = 2'-O-methoxyethyl modified 5-methylcytosine
  modified_base 13: mod_base = OTHER; note = 2'-O-methoxyethyl modified nucleotide
  modified_base 14: mod_base = OTHER; note = 2'-O-methoxyethyl modified nucleotide
caaagcggaaccag

SEQ ID NO: 252 - RNA, 15 nt, synthetic construct
  source 1..15: mol_type = other RNA
  modified_base 1: mod_base = OTHER; note = 2'-O-methoxyethyl modified 5-methylcytosine
  modified_base 2: mod_base = OTHER; note = 2'-O-methoxyethyl modified 5-methylcytosine
  modified_base 3: mod_base = OTHER; note = 2'-O-methoxyethyl modified nucleotide
  modified_base 4: mod_base = OTHER; note = 2'-O-methoxyethyl modified nucleotide
  modified_base 5: mod_base = OTHER; note = 2'-O-methoxyethyl modified nucleotide
  modified_base 6: mod_base = OTHER; note = 2'-O-methoxyethyl modified nucleotide
  modified_base 7: mod_base = OTHER; note = 2'-O-methoxyethyl modified 5-methylcytosine
  modified_base 8: mod_base = OTHER; note = 2'-O-methoxyethyl modified nucleotide
  modified_base 9: mod_base = OTHER; note = 2'-O-methoxyethyl modified nucleotide
  modified_base 10: mod_base = OTHER; note = 2'-O-methoxyethyl modified nucleotide
  modified_base 11: mod_base = OTHER; note = 2'-O-methoxyethyl modified nucleotide
  modified_base 12: mod_base = OTHER; note = 2'-O-methoxyethyl modified 5-methylcytosine
  modified_base 13: mod_base = OTHER; note = 2'-O-methoxyethyl modified 5-methylcytosine
  modified_base 14: mod_base = OTHER; note = 2'-O-methoxyethyl modified nucleotide
  modified_base 15: mod_base = OTHER; note = 2'-O-methoxyethyl modified nucleotide
ccaaagcggaaccag

SEQ ID NO: 253 - RNA, 16 nt, synthetic construct
  source 1..16: mol_type = other RNA
  modified_base 1: mod_base = OTHER; note = 2'-O-methoxyethyl modified nucleotide
  modified_base 2: mod_base = OTHER; note = 2'-O-methoxyethyl modified 5-methylcytosine
  modified_base 3: mod_base = OTHER; note = 2'-O-methoxyethyl modified 5-methylcytosine
  modified_base 4: mod_base = OTHER; note = 2'-O-methoxyethyl modified nucleotide
  modified_base 5: mod_base = OTHER; note = 2'-O-methoxyethyl modified nucleotide
  modified_base 6: mod_base = OTHER; note = 2'-O-methoxyethyl modified nucleotide
  modified_base 7: mod_base = OTHER; note = 2'-O-methoxyethyl modified nucleotide
  modified_base 8: mod_base = OTHER; note = 2'-O-methoxyethyl modified 5-methylcytosine
  modified_base 9: mod_base = OTHER; note = 2'-O-methoxyethyl modified nucleotide
  modified_base 10: mod_base = OTHER; note = 2'-O-methoxyethyl modified nucleotide
  modified_base 11: mod_base = OTHER; note = 2'-O-methoxyethyl modified nucleotide
  modified_base 12: mod_base = OTHER; note = 2'-O-methoxyethyl modified nucleotide
  modified_base 13: mod_base = OTHER; note = 2'-O-methoxyethyl modified 5-methylcytosine
  modified_base 14: mod_base = OTHER; note = 2'-O-methoxyethyl modified 5-methylcytosine
  modified_base 15: mod_base = OTHER; note = 2'-O-methoxyethyl modified nucleotide
  modified_base 16: mod_base = OTHER; note = 2'-O-methoxyethyl modified nucleotide
gccaaagcggaaccag

SEQ ID NO: 254 - RNA, 16 nt, synthetic construct
  source 1..16: mol_type = other RNA
  modified_base 1: mod_base = OTHER; note = 2'-O-methoxyethyl modified nucleotide
  modified_base 2: mod_base = OTHER; note = 2'-O-methoxyethyl modified 5-methylcytosine
  modified_base 3: mod_base = OTHER; note = 2'-O-methoxyethyl modified 5-methylcytosine
  modified_base 4: mod_base = OTHER; note = 2'-O-methoxyethyl modified nucleotide
  modified_base 5: mod_base = OTHER; note = 2'-O-methoxyethyl modified nucleotide
  modified_base 6: mod_base = OTHER; note = 2'-O-methoxyethyl modified nucleotide
  modified_base 7: mod_base = OTHER; note = 2'-O-methoxyethyl modified nucleotide
  modified_base 8: mod_base = OTHER; note = 2'-O-methoxyethyl modified 5-methylcytosine
  modified_base 9: mod_base = OTHER; note = 2'-O-methoxyethyl modified nucleotide
  modified_base 10: mod_base = OTHER; note = 2'-O-methyl modified 7-deazaguanine
  modified_base 11: mod_base = OTHER; note = 2'-O-methoxyethyl modified nucleotide
  modified_base 12: mod_base = OTHER; note = 2'-O-methoxyethyl modified nucleotide
  modified_base 13: mod_base = OTHER; note = 2'-O-methoxyethyl modified 5-methylcytosine
  modified_base 14: mod_base = OTHER; note = 2'-O-methoxyethyl modified 5-methylcytosine
  modified_base 15: mod_base = OTHER; note = 2'-O-methoxyethyl modified nucleotide
  modified_base 16: mod_base = OTHER; note = 2'-O-methoxyethyl modified nucleotide
gccaaagcggaaccag

SEQ ID NO: 255 - RNA, 16 nt, synthetic construct
  source 1..16: mol_type = other RNA
  modified_base 1: mod_base = OTHER; note = 2'-O-methoxyethyl modified nucleotide
  modified_base 2: mod_base = OTHER; note = 2'-O-methoxyethyl modified 5-methylcytosine
  modified_base 3: mod_base = OTHER; note = 2'-O-methoxyethyl modified 5-methylcytosine
  modified_base 4: mod_base = OTHER; note = 2'-O-methoxyethyl modified nucleotide
  modified_base 5: mod_base = OTHER; note = 2'-O-methoxyethyl modified nucleotide
  modified_base 6: mod_base = OTHER; note = 2'-O-methoxyethyl modified nucleotide
  modified_base 7: mod_base = OTHER; note = 2'-O-methoxyethyl modified nucleotide
  modified_base 8: mod_base = OTHER; note = 2'-O-methoxyethyl modified 5-methylcytosine
  modified_base 9: mod_base = OTHER; note = 2'-O-methoxyethyl modified nucleotide
  modified_base 10: mod_base = OTHER; note = 2'-O-methoxyethyl modified nucleotide
  modified_base 11: mod_base = OTHER; note = 2'-O-methoxyethyl modified nucleotide
  modified_base 12: mod_base = OTHER; note = 2'-O-methoxyethyl modified nucleotide
  modified_base 13: mod_base = OTHER; note = 2'-fluoro modified nucleotide
  modified_base 14: mod_base = OTHER; note = 2'-O-methoxyethyl modified 5-methylcytosine
  modified_base 15: mod_base = OTHER; note = 2'-O-methoxyethyl modified nucleotide
  modified_base 16: mod_base = OTHER; note = 2'-O-methoxyethyl modified nucleotide
gccaaagcggaaccag

SEQ ID NO: 256 - RNA, 16 nt, synthetic construct
  source 1..16: mol_type = other RNA
  modified_base 1: mod_base = OTHER; note = 2'-fluoro modified nucleotide
  modified_base 2: mod_base = OTHER; note = 2'-O-methoxyethyl modified 5-methylcytosine
  modified_base 3: mod_base = OTHER; note = 2'-O-methoxyethyl modified 5-methylcytosine
  modified_base 4: mod_base = OTHER; note = 2'-O-methoxyethyl modified nucleotide
  modified_base 5: mod_base = OTHER; note = 2'-O-methoxyethyl modified nucleotide
  modified_base 6: mod_base = OTHER; note = 2'-O-methoxyethyl modified nucleotide
  modified_base 7: mod_base = OTHER; note = 2'-O-methoxyethyl modified nucleotide
  modified_base 8: mod_base = OTHER; note = 2'-O-methoxyethyl modified 5-methylcytosine
  modified_base 9: mod_base = OTHER; note = 2'-O-methoxyethyl modified nucleotide
  modified_base 10: mod_base = OTHER; note = 2'-O-methoxyethyl modified nucleotide
  modified_base 11: mod_base = OTHER; note = 2'-O-methoxyethyl modified nucleotide
  modified_base 12: mod_base = OTHER; note = 2'-O-methoxyethyl modified nucleotide
  modified_base 13: mod_base = OTHER; note = 2'-O-methoxyethyl modified 5-methylcytosine
  modified_base 14: mod_base = OTHER; note = 2'-O-methoxyethyl modified 5-methylcytosine
  modified_base 15: mod_base = OTHER; note = 2'-O-methoxyethyl modified nucleotide
  modified_base 16: mod_base = OTHER; note = 2'-O-methoxyethyl modified nucleotide
gccaaagcggaaccag

SEQ ID NO: 257 - RNA, 16 nt, synthetic construct
  source 1..16: mol_type = other RNA
  modified_base 1: mod_base = OTHER; note = 2'-O-methoxyethyl modified nucleotide
  modified_base 2: mod_base = OTHER; note = 2'-O-methoxyethyl modified 5-methylcytosine
  modified_base 3: mod_base = OTHER; note = 2'-O-methoxyethyl modified 5-methylcytosine
  modified_base 4: mod_base = OTHER; note = 2'-O-methoxyethyl modified nucleotide
  modified_base 5: mod_base = OTHER; note = 2'-O-methoxyethyl modified nucleotide
  modified_base 6: mod_base = OTHER; note = 2'-O-methoxyethyl modified nucleotide
  modified_base 7: mod_base = OTHER; note = 2'-O-methoxyethyl modified nucleotide
  modified_base 8: mod_base = OTHER; note = 2'-fluoro modified nucleotide
  modified_base 9: mod_base = OTHER; note = 2'-O-methoxyethyl modified nucleotide
  modified_base 10: mod_base = OTHER; note = 2'-O-methoxyethyl modified nucleotide
  modified_base 11: mod_base = OTHER; note = 2'-O-methoxyethyl modified nucleotide
  modified_base 12: mod_base = OTHER; note = 2'-O-methoxyethyl modified nucleotide
  modified_base 13: mod_base = OTHER; note = 2'-O-methoxyethyl modified 5-methylcytosine
  modified_base 14: mod_base = OTHER; note = 2'-O-methoxyethyl modified 5-methylcytosine
  modified_base 15: mod_base = OTHER; note = 2'-O-methoxyethyl modified nucleotide
  modified_base 16: mod_base = OTHER; note = 2'-O-methoxyethyl modified nucleotide
gccaaagcggaaccag

SEQ ID NO: 258 - RNA, 16 nt, synthetic construct
  source 1..16: mol_type = other RNA
  modified_base 1: mod_base = OTHER; note = 2'-O-methoxyethyl modified nucleotide
  modified_base 2: mod_base = OTHER; note = 2'-O-methoxyethyl modified 5-methylcytosine
  modified_base 3: mod_base = OTHER; note = 2'-O-methoxyethyl modified 5-methylcytosine
  modified_base 4: mod_base = OTHER; note = 2'-O-methoxyethyl modified nucleotide
  modified_base 5: mod_base = OTHER; note = 2'-O-methoxyethyl modified nucleotide
  modified_base 6: mod_base = OTHER; note = 2'-O-methoxyethyl modified nucleotide
  modified_base 7: mod_base = OTHER; note = 2'-O-methoxyethyl modified nucleotide
  modified_base 8: mod_base = OTHER; note = 2'-O-methoxyethyl modified 5-methylcytosine
  modified_base 9: mod_base = OTHER; note = 2'-fluoro modified nucleotide
  modified_base 10: mod_base = OTHER; note = 2'-O-methoxyethyl modified nucleotide
  modified_base 11: mod_base = OTHER; note = 2'-O-methoxyethyl modified nucleotide
  modified_base 12: mod_base = OTHER; note = 2'-O-methoxyethyl modified nucleotide
  modified_base 13: mod_base = OTHER; note = 2'-O-methoxyethyl modified 5-methylcytosine
  modified_base 14: mod_base = OTHER; note = 2'-O-methoxyethyl modified 5-methylcytosine
  modified_base 15: mod_base = OTHER; note = 2'-O-methoxyethyl modified nucleotide
  modified_base 16: mod_base = OTHER; note = 2'-O-methoxyethyl modified nucleotide
gccaaagcggaaccag

SEQ ID NO: 259 - RNA, 16 nt, synthetic construct
  source 1..16: mol_type = other RNA
  modified_base 1: mod_base = OTHER; note = 2'-O-methoxyethyl modified nucleotide
  modified_base 2: mod_base = OTHER; note = 2'-O-methoxyethyl modified 5-methylcytosine
  modified_base 3: mod_base = OTHER; note = 2'-O-methoxyethyl modified 5-methylcytosine
  modified_base 4: mod_base = OTHER; note = 2'-O-methoxyethyl modified nucleotide
  modified_base 5: mod_base = OTHER; note = 2'-O-methoxyethyl modified nucleotide
  modified_base 6: mod_base = OTHER; note = 2'-O-methoxyethyl modified nucleotide
  modified_base 7: mod_base = OTHER; note = 2'-fluoro modified nucleotide
  modified_base 8: mod_base = OTHER; note = 2'-O-methoxyethyl modified 5-methylcytosine
  modified_base 9: mod_base = OTHER; note = 2'-O-methoxyethyl modified nucleotide
  modified_base 10: mod_base = OTHER; note = 2'-O-methoxyethyl modified nucleotide
  modified_base 11: mod_base = OTHER; note = 2'-O-methoxyethyl modified nucleotide
  modified_base 12: mod_base = OTHER; note = 2'-O-methoxyethyl modified nucleotide
  modified_base 13: mod_base = OTHER; note = 2'-O-methoxyethyl modified 5-methylcytosine
  modified_base 14: mod_base = OTHER; note = 2'-O-methoxyethyl modified 5-methylcytosine
  modified_base 15: mod_base = OTHER; note = 2'-O-methoxyethyl modified nucleotide
  modified_base 16: mod_base = OTHER; note = 2'-O-methoxyethyl modified nucleotide
gccaaagcggaaccag

SEQ ID NO: 260 - RNA, 16 nt, synthetic construct
  source 1..16: mol_type = other RNA
  modified_base 1: mod_base = OTHER; note = 2'-O-methoxyethyl modified nucleotide
  modified_base 2: mod_base = OTHER; note = 2'-O-methoxyethyl modified 5-methylcytosine
  modified_base 3: mod_base = OTHER; note = 2'-O-methoxyethyl modified 5-methylcytosine
  modified_base 4: mod_base = OTHER; note = 2'-O-methoxyethyl modified nucleotide
  modified_base 5: mod_base = OTHER; note = 2'-O-methoxyethyl modified nucleotide
  modified_base 6: mod_base = OTHER; note = 2'-O-methoxyethyl modified nucleotide
  modified_base 7: mod_base = OTHER; note = 2'-O-methoxyethyl modified nucleotide
  modified_base 8: mod_base = OTHER; note = 2'-O-methoxyethyl modified 5-methylcytosine
  modified_base 9: mod_base = OTHER; note = 2'-O-methoxyethyl modified nucleotide
  modified_base 10: mod_base = OTHER; note = 2'-O-methoxyethyl modified nucleotide
  modified_base 11: mod_base = OTHER; note = 2'-O-methoxyethyl modified nucleotide
  modified_base 12: mod_base = OTHER; note = 2'-O-methoxyethyl modified nucleotide
  modified_base 13: mod_base = OTHER; note = 2'-O-methoxyethyl modified 5-methylcytosine
  modified_base 14: mod_base = OTHER; note = 2'-O-methoxyethyl modified 5-methylcytosine
  modified_base 15: mod_base = OTHER; note = 2'-O-methoxyethyl modified nucleotide
  modified_base 16: mod_base = OTHER; note = 2'-fluoro modified nucleotide
gccaaagcggaaccag

SEQ ID NO: 261 - RNA, 16 nt, synthetic construct
  source 1..16: mol_type = other RNA
  modified_base 1: mod_base = OTHER; note = 2'-O-methoxyethyl modified 5-methylcytosine
  modified_base 2: mod_base = OTHER; note = 2'-O-methoxyethyl modified thymine
  modified_base 3: mod_base = OTHER; note = 2'-O-methoxyethyl modified thymine
  modified_base 4: mod_base = OTHER; note = 2'-O-methoxyethyl modified 5-methylcytosine
  modified_base 5: mod_base = OTHER; note = 2'-O-methoxyethyl modified nucleotide
  modified_base 6: mod_base = OTHER; note = 2'-O-methoxyethyl modified 5-methylcytosine
  modified_base 7: mod_base = OTHER; note = 2'-O-methoxyethyl modified nucleotide
  modified_base 8: mod_base = OTHER; note = 2'-O-methoxyethyl modified nucleotide
  modified_base 9: mod_base = OTHER; note = 2'-O-methoxyethyl modified 5-methylcytosine
  modified_base 10: mod_base = OTHER; note = 2'-O-methoxyethyl modified 5-methylcytosine
  modified_base 11: mod_base = OTHER; note = 2'-O-methoxyethyl modified nucleotide
  modified_base 12: mod_base = OTHER; note = 2'-O-methoxyethyl modified nucleotide
  modified_base 13: mod_base = OTHER; note = 2'-O-methoxyethyl modified 5-methylcytosine
  modified_base 14: mod_base = OTHER; note = 2'-O-methoxyethyl modified 5-methylcytosine
  modified_base 15: mod_base = OTHER; note = 2'-O-methoxyethyl modified thymine
  modified_base 16: mod_base = OTHER; note = 2'-O-methoxyethyl modified nucleotide
cttcacgaccaacctg

SEQ ID NO: 262 - RNA, 15 nt, synthetic construct
  source 1..15: mol_type = other RNA
  modified_base 1: mod_base = OTHER; note = 2'-O-methoxyethyl modified 5-methylcytosine
  modified_base 2: mod_base = OTHER; note = 2'-O-methoxyethyl modified thymine
  modified_base 3: mod_base = OTHER; note = 2'-O-methoxyethyl modified thymine
  modified_base 4: mod_base = OTHER; note = 2'-O-methoxyethyl modified 5-methylcytosine
  modified_base 5: mod_base = OTHER; note = 2'-O-methoxyethyl modified nucleotide
  modified_base 6: mod_base = OTHER; note = 2'-O-methoxyethyl modified 5-methylcytosine
  modified_base 7: mod_base = OTHER; note = 2'-O-methoxyethyl modified nucleotide
  modified_base 8: mod_base = OTHER; note = 2'-O-methoxyethyl modified nucleotide
  modified_base 9: mod_base = OTHER; note = 2'-O-methoxyethyl modified 5-methylcytosine
  modified_base 10: mod_base = OTHER; note = 2'-O-methoxyethyl modified 5-methylcytosine
  modified_base 11: mod_base = OTHER; note = 2'-O-methoxyethyl modified nucleotide
  modified_base 12: mod_base = OTHER; note = 2'-O-methoxyethyl modified nucleotide
  modified_base 13: mod_base = OTHER; note = 2'-O-methoxyethyl modified 5-methylcytosine
  modified_base 14: mod_base = OTHER; note = 2'-O-methoxyethyl modified 5-methylcytosine
  modified_base 15: mod_base = OTHER; note = 2'-O-methoxyethyl modified thymine
cttcacgaccaacct

SEQ ID NO: 263 - RNA, 14 nt, synthetic construct
  source 1..14: mol_type = other RNA
  modified_base 1: mod_base = OTHER; note = 2'-O-methoxyethyl modified 5-methylcytosine
  modified_base 2: mod_base = OTHER; note = 2'-O-methoxyethyl modified thymine
  modified_base 3: mod_base = OTHER; note = 2'-O-methoxyethyl modified thymine
  modified_base 4: mod_base = OTHER; note = 2'-O-methoxyethyl modified 5-methylcytosine
  modified_base 5: mod_base = OTHER; note = 2'-O-methoxyethyl modified nucleotide
  modified_base 6: mod_base = OTHER; note = 2'-O-methoxyethyl modified 5-methylcytosine
  modified_base 7: mod_base = OTHER; note = 2'-O-methoxyethyl modified nucleotide
  modified_base 8: mod_base = OTHER; note = 2'-O-methoxyethyl modified nucleotide
  modified_base 9: mod_base = OTHER; note = 2'-O-methoxyethyl modified 5-methylcytosine
  modified_base 10: mod_base = OTHER; note = 2'-O-methoxyethyl modified 5-methylcytosine
  modified_base 11: mod_base = OTHER; note = 2'-O-methoxyethyl modified nucleotide
  modified_base 12: mod_base = OTHER; note = 2'-O-methoxyethyl modified nucleotide
  modified_base 13: mod_base = OTHER; note = 2'-O-methoxyethyl modified 5-methylcytosine
  modified_base 14: mod_base = OTHER; note = 2'-O-methoxyethyl modified 5-methylcytosine
cttcacgaccaacc

SEQ ID NO: 264 - RNA, 13 nt, synthetic construct
  source 1..13: mol_type = other RNA
  modified_base 1: mod_base = OTHER; note = 2'-O-methoxyethyl modified 5-methylcytosine
  modified_base 2: mod_base = OTHER; note = 2'-O-methoxyethyl modified thymine
  modified_base 3: mod_base = OTHER; note = 2'-O-methoxyethyl modified thymine
  modified_base 4: mod_base = OTHER; note = 2'-O-methoxyethyl modified 5-methylcytosine
  modified_base 5: mod_base = OTHER; note = 2'-O-methoxyethyl modified nucleotide
  modified_base 6: mod_base = OTHER; note = 2'-O-methoxyethyl modified 5-methylcytosine
  modified_base 7: mod_base = OTHER; note = 2'-O-methoxyethyl modified nucleotide
  modified_base 8: mod_base = OTHER; note = 2'-O-methoxyethyl modified nucleotide
  modified_base 9: mod_base = OTHER; note = 2'-O-methoxyethyl modified 5-methylcytosine
  modified_base 10: mod_base = OTHER; note = 2'-O-methoxyethyl modified 5-methylcytosine
  modified_base 11: mod_base = OTHER; note = 2'-O-methoxyethyl modified nucleotide
  modified_base 12: mod_base = OTHER; note = 2'-O-methoxyethyl modified nucleotide
  modified_base 13: mod_base = OTHER; note = 2'-O-methoxyethyl modified 5-methylcytosine
cttcacgaccaac

SEQ ID NO: 265 - RNA, 16 nt, synthetic construct
  source 1..16: mol_type = other RNA
  modified_base 1: mod_base = OTHER; note = 2'-O-methoxyethyl modified thymine
  modified_base 2: mod_base = OTHER; note = 2'-O-methoxyethyl modified 5-methylcytosine
  modified_base 3: mod_base = OTHER; note = 2'-O-methoxyethyl modified nucleotide
  modified_base 4: mod_base = OTHER; note = 2'-O-methoxyethyl modified 5-methylcytosine
  modified_base 5: mod_base = OTHER; note = 2'-O-methoxyethyl modified nucleotide
  modified_base 6: mod_base = OTHER; note = 2'-O-methoxyethyl modified nucleotide
  modified_base 7: mod_base = OTHER; note = 2'-O-methoxyethyl modified 5-methylcytosine
  modified_base 8: mod_base = OTHER; note = 2'-O-methoxyethyl modified 5-methylcytosine
  modified_base 9: mod_base = OTHER; note = 2'-O-methoxyethyl modified nucleotide
  modified_base 10: mod_base = OTHER; note = 2'-O-methoxyethyl modified nucleotide
  modified_base 11: mod_base = OTHER; note = 2'-O-methoxyethyl modified 5-methylcytosine
  modified_base 12: mod_base = OTHER; note = 2'-O-methoxyethyl modified 5-methylcytosine
  modified_base 13: mod_base = OTHER; note = 2'-O-methoxyethyl modified thymine
  modified_base 14: mod_base = OTHER; note = 2'-O-methoxyethyl modified nucleotide
  modified_base 15: mod_base = OTHER; note = 2'-O-methoxyethyl modified 5-methylcytosine
  modified_base 16: mod_base = OTHER; note = 2'-O-methoxyethyl modified nucleotide
tcacgaccaacctgca

SEQ ID NO: 266 - RNA, 15 nt, synthetic construct
  source 1..15: mol_type = other RNA
  modified_base 1: mod_base = OTHER; note = 2'-O-methoxyethyl modified nucleotide
  modified_base 2: mod_base = OTHER; note = 2'-O-methoxyethyl modified nucleotide
  modified_base 3: mod_base = OTHER; note = 2'-O-methoxyethyl modified 5-methylcytosine
  modified_base 4: mod_base = OTHER; note = 2'-O-methoxyethyl modified thymine
  modified_base 5: mod_base = OTHER; note = 2'-O-methoxyethyl modified thymine
  modified_base 6: mod_base = OTHER; note = 2'-O-methoxyethyl modified 5-methylcytosine
  modified_base 7: mod_base = OTHER; note = 2'-O-methoxyethyl modified nucleotide
  modified_base 8: mod_base = OTHER; note = 2'-O-methoxyethyl modified 5-methylcytosine
  modified_base 9: mod_base = OTHER; note = 2'-O-methoxyethyl modified nucleotide
  modified_base 10: mod_base = OTHER; note = 2'-O-methoxyethyl modified nucleotide
  modified_base 11: mod_base = OTHER; note = 2'-O-methoxyethyl modified 5-methylcytosine
  modified_base 12: mod_base = OTHER; note = 2'-O-methoxyethyl modified 5-methylcytosine
  modified_base 13: mod_base = OTHER; note = 2'-O-methoxyethyl modified nucleotide
  modified_base 14: mod_base = OTHER; note = 2'-O-methoxyethyl modified nucleotide
  modified_base 15: mod_base = OTHER; note = 2'-O-methoxyethyl modified 5-methylcytosine
ggcttcacgaccaac

SEQ ID NO: 267 - RNA, 14 nt, synthetic construct
  source 1..14: mol_type = other RNA
  modified_base 1: mod_base = OTHER; note = 2'-O-methoxyethyl modified nucleotide
  modified_base 2: mod_base = OTHER; note = 2'-O-methoxyethyl modified 5-methylcytosine
  modified_base 3: mod_base = OTHER; note = 2'-O-methoxyethyl modified thymine
  modified_base 4: mod_base = OTHER; note = 2'-O-methoxyethyl modified thymine
  modified_base 5: mod_base = OTHER; note = 2'-O-methoxyethyl modified 5-methylcytosine
  modified_base 6: mod_base = OTHER; note = 2'-O-methoxyethyl modified nucleotide
  modified_base 7: mod_base = OTHER; note = 2'-O-methoxyethyl modified 5-methylcytosine
  modified_base 8: mod_base = OTHER; note = 2'-O-methoxyethyl modified nucleotide
  modified_base 9: mod_base = OTHER; note = 2'-O-methoxyethyl modified nucleotide
  modified_base 10: mod_base = OTHER; note = 2'-O-methoxyethyl modified 5-methylcytosine
  modified_base 11: mod_base = OTHER; note = 2'-O-methoxyethyl modified 5-methylcytosine
  modified_base 12: mod_base = OTHER; note = 2'-O-methoxyethyl modified nucleotide
  modified_base 13: mod_base = OTHER; note = 2'-O-methoxyethyl modified nucleotide
  modified_base 14: mod_base = OTHER; note = 2'-O-methoxyethyl modified 5-methylcytosine
gcttcacgaccaac

SEQ ID NO: 268 - RNA, 18 nt, synthetic construct
  source 1..18: mol_type = other RNA
  modified_base 1: mod_base = OTHER; note = 2'-O-methoxyethyl modified 5-methylcytosine
  modified_base 2: mod_base = OTHER; note = 2'-O-methoxyethyl modified thymine
  modified_base 3: mod_base = OTHER; note = 2'-O-methoxyethyl modified thymine
  modified_base 4: mod_base = OTHER; note = 2'-O-methoxyethyl modified 5-methylcytosine
  modified_base 5: mod_base = OTHER; note = 2'-O-methyl modified nucleotide
  modified_base 6: mod_base = OTHER; note = 2'-O-methoxyethyl modified 5-methylcytosine
  modified_base 7: mod_base = OTHER; note = 2'-O-methyl modified nucleotide
  modified_base 8: mod_base = OTHER; note = 2'-O-methyl modified nucleotide
  modified_base 9: mod_base = OTHER; note = 2'-O-methoxyethyl modified 5-methylcytosine
  modified_base 10: mod_base = OTHER; note = 2'-O-methoxyethyl modified 5-methylcytosine
  modified_base 11: mod_base = OTHER; note = 2'-O-methyl modified nucleotide
  modified_base 12: mod_base = OTHER; note = 2'-O-methyl modified nucleotide
  modified_base 13: mod_base = OTHER; note = 2'-O-methoxyethyl modified 5-methylcytosine
  modified_base 14: mod_base = OTHER; note = 2'-O-methoxyethyl modified 5-methylcytosine
  modified_base 15: mod_base = OTHER; note = 2'-O-methoxyethyl modified thymine
  modified_base 16: mod_base = OTHER; note = 2'-O-methyl modified nucleotide
  modified_base 17: mod_base = OTHER; note = 2'-O-methoxyethyl modified 5-methylcytosine
  modified_base 18: mod_base = OTHER; note = 2'-O-methyl modified nucleotide
cttcacgaccaacctgca

SEQ ID NO: 269 - RNA, 18 nt, synthetic construct
  source 1..18: mol_type = other RNA
  modified_base 1: mod_base = OTHER; note = 2'-O-methoxyethyl modified 5-methylcytosine
  modified_base 2: mod_base = OTHER; note = 2'-O-methoxyethyl modified thymine
  modified_base 3: mod_base = OTHER; note = 2'-O-methoxyethyl modified thymine
  modified_base 4: mod_base = OTHER; note = 2'-O-methoxyethyl modified 5-methylcytosine
  modified_base 5: mod_base = OTHER; note = 2'-O-methoxyethyl modified nucleotide
  modified_base 6: mod_base = OTHER; note = 2'-O-methoxyethyl modified 5-methylcytosine
  modified_base 7: mod_base = OTHER; note = 2'-O-methoxyethyl modified nucleotide
  modified_base 8: mod_base = OTHER; note = 2'-O-methoxyethyl modified nucleotide
  modified_base 9: mod_base = OTHER; note = 2'-O-methoxyethyl modified 5-methylcytosine
  modified_base 10: mod_base = OTHER; note = 2'-fluoro modified nucleotide
  modified_base 11: mod_base = OTHER; note = 2'-O-methoxyethyl modified nucleotide
  modified_base 12: mod_base = OTHER; note = 2'-O-methoxyethyl modified nucleotide
  modified_base 13: mod_base = OTHER; note = 2'-O-methoxyethyl modified 5-methylcytosine
  modified_base 14: mod_base = OTHER; note = 2'-O-methoxyethyl modified 5-methylcytosine
  modified_base 15: mod_base = OTHER; note = 2'-O-methoxyethyl modified thymine
  modified_base 16: mod_base = OTHER; note = 2'-O-methoxyethyl modified nucleotide
  modified_base 17: mod_base = OTHER; note = 2'-O-methoxyethyl modified 5-methylcytosine
  modified_base 18: mod_base = OTHER; note = 2'-O-methoxyethyl modified nucleotide
cttcacgaccaacctgca

SEQ ID NO: 270 - RNA, 18 nt, synthetic construct
  source 1..18: mol_type = other RNA
  modified_base 1: mod_base = OTHER; note = 2'-O-methoxyethyl modified 5-methylcytosine
  modified_base 2: mod_base = OTHER; note = 2'-O-methoxyethyl modified thymine
  modified_base 3: mod_base = OTHER; note = 2'-O-methoxyethyl modified thymine
  modified_base 4: mod_base = OTHER; note = 2'-O-methoxyethyl modified 5-methylcytosine
  modified_base 5: mod_base = OTHER; note = 2'-O-methoxyethyl modified nucleotide
  modified_base 6: mod_base = OTHER; note = 2'-O-methoxyethyl modified 5-methylcytosine
  modified_base 7: mod_base = OTHER; note = 2'-O-methoxyethyl modified nucleotide
  modified_base 8: mod_base = OTHER; note = 2'-O-methoxyethyl modified nucleotide
  modified_base 9: mod_base = OTHER; note = 2'-O-methoxyethyl modified 5-methylcytosine
  modified_base 10: mod_base = OTHER; note = 2'-O-methoxyethyl modified 5-methylcytosine
  modified_base 11: mod_base = OTHER; note = 2'-O-methoxyethyl modified nucleotide
  modified_base 12: mod_base = OTHER; note = 2'-O-methoxyethyl modified nucleotide
  modified_base 13: mod_base = OTHER; note = 2'-O-methoxyethyl modified 5-methylcytosine
  modified_base 14: mod_base = OTHER; note = 2'-O-methoxyethyl modified 5-methylcytosine
  modified_base 15: mod_base = OTHER; note = 2'-O-methoxyethyl modified thymine
  modified_base 16: mod_base = OTHER; note = 2'-O-methyl modified 7-deazaguanine
  modified_base 17: mod_base = OTHER; note = 2'-O-methoxyethyl modified 5-methylcytosine
  modified_base 18: mod_base = OTHER; note = 2'-O-methoxyethyl modified nucleotide
cttcacgaccaacctgca

SEQ ID NO: 271 - RNA, 18 nt, synthetic construct
  source 1..18: mol_type = other RNA
  modified_base 1: mod_base = OTHER; note = 2'-O-methoxyethyl modified 5-methylcytosine
  modified_base 2: mod_base = OTHER; note = 2'-O-methoxyethyl modified thymine
  modified_base 3: mod_base = OTHER; note = 2'-O-methoxyethyl modified thymine
  modified_base 4: mod_base = OTHER; note = 2'-O-methoxyethyl modified 5-methylcytosine
  modified_base 5: mod_base = OTHER; note = 2'-O-methoxyethyl modified nucleotide
  modified_base 6: mod_base = OTHER; note = 2'-O-methoxyethyl modified 5-methylcytosine
  modified_base 7: mod_base = OTHER; note = 2'-O-methoxyethyl modified nucleotide
  modified_base 8: mod_base = OTHER; note = 2'-O-methoxyethyl modified nucleotide
  modified_base 9: mod_base = OTHER; note = 2'-O-methoxyethyl modified 5-methylcytosine
  modified_base 10: mod_base = OTHER; note = 2'-O-methoxyethyl modified 5-methylcytosine
  modified_base 11: mod_base = OTHER; note = 2'-O-methoxyethyl modified nucleotide
  modified_base 12: mod_base = OTHER; note = 2'-O-methoxyethyl modified nucleotide
  modified_base 13: mod_base = OTHER; note = 2'-O-methoxyethyl modified 5-methylcytosine
  modified_base 14: mod_base = OTHER; note = 2'-fluoro modified nucleotide
  modified_base 15: mod_base = OTHER; note = 2'-O-methoxyethyl modified thymine
  modified_base 16: mod_base = OTHER; note = 2'-O-methoxyethyl modified nucleotide
  modified_base 17: mod_base = OTHER; note = 2'-O-methoxyethyl modified 5-methylcytosine
  modified_base 18: mod_base = OTHER; note = 2'-O-methoxyethyl modified nucleotide
cttcacgaccaacctgca

SEQ ID NO: 272 - RNA, 18 nt, synthetic construct
  source 1..18: mol_type = other RNA
  modified_base 1: mod_base = OTHER; note = 2'-O-methoxyethyl modified 5-methylcytosine
  modified_base 2: mod_base = OTHER; note = 2'-fluoro modified nucleotide
  modified_base 3: mod_base = OTHER; note = 2'-O-methoxyethyl modified thymine
  modified_base 4: mod_base = OTHER; note = 2'-O-methoxyethyl modified 5-methylcytosine
  modified_base 5: mod_base = OTHER; note = 2'-O-methoxyethyl modified nucleotide
  modified_base 6: mod_base = OTHER; note = 2'-O-methoxyethyl modified 5-methylcytosine
  modified_base 7: mod_base = OTHER; note = 2'-O-methoxyethyl modified nucleotide
  modified_base 8: mod_base = OTHER; note = 2'-O-methoxyethyl modified nucleotide
  modified_base 9: mod_base = OTHER; note = 2'-O-methoxyethyl modified 5-methylcytosine
  modified_base 10: mod_base = OTHER; note = 2'-O-methoxyethyl modified 5-methylcytosine
  modified_base 11: mod_base = OTHER; note = 2'-O-methoxyethyl modified nucleotide
  modified_base 12: mod_base = OTHER; note = 2'-O-methoxyethyl modified nucleotide
  modified_base 13: mod_base = OTHER; note = 2'-O-methoxyethyl modified 5-methylcytosine
  modified_base 14: mod_base = OTHER; note = 2'-O-methoxyethyl modified 5-methylcytosine
  modified_base 15: mod_base = OTHER; note = 2'-O-methoxyethyl modified thymine
  modified_base 16: mod_base = OTHER; note = 2'-O-methoxyethyl modified nucleotide
  modified_base 17: mod_base = OTHER; note = 2'-O-methoxyethyl modified 5-methylcytosine
  modified_base 18: mod_base = OTHER; note = 2'-O-methoxyethyl modified nucleotide
cttcacgaccaacctgca

SEQ ID NO: 273 - RNA, 18 nt, synthetic construct
  source 1..18: mol_type = other RNA
  modified_base 1: mod_base = OTHER; note = 2'-O-methoxyethyl modified 5-methylcytosine
  modified_base 2: mod_base = OTHER; note = 2'-O-methoxyethyl modified thymine
  modified_base 3: mod_base = OTHER; note = 2'-O-methoxyethyl modified thymine
  modified_base 4: mod_base = OTHER; note = 2'-O-methoxyethyl modified 5-methylcytosine
  modified_base 5: mod_base = OTHER; note = 2'-O-methoxyethyl modified nucleotide
  modified_base 6: mod_base = OTHER; note = 2'-O-methoxyethyl modified 5-methylcytosine
  modified_base 7: mod_base = OTHER; note = 2'-O-methoxyethyl modified nucleotide
  modified_base 8: mod_base = OTHER; note = 2'-O-methoxyethyl modified nucleotide
  modified_base 9: mod_base = OTHER; note = 2'-fluoro modified nucleotide
  modified_base 10: mod_base = OTHER; note = 2'-O-methoxyethyl modified 5-methylcytosine
  modified_base 11: mod_base = OTHER; note = 2'-O-methoxyethyl modified nucleotide
  modified_base 12: mod_base = OTHER; note = 2'-O-methoxyethyl modified nucleotide
  modified_base 13: mod_base = OTHER; note = 2'-O-methoxyethyl modified 5-methylcytosine
  modified_base 14: mod_base = OTHER; note = 2'-O-methoxyethyl modified 5-methylcytosine
  modified_base 15: mod_base = OTHER; note = 2'-O-methoxyethyl modified thymine
  modified_base 16: mod_base = OTHER; note = 2'-O-methoxyethyl modified nucleotide
  modified_base 17: mod_base = OTHER; note = 2'-O-methoxyethyl modified 5-methylcytosine
  modified_base 18: mod_base = OTHER; note = 2'-O-methoxyethyl modified nucleotide
cttcacgaccaacctgca

SEQ ID NO: 274 - RNA, 18 nt, synthetic construct
  source 1..18: mol_type = other RNA
  modified_base 1: mod_base = OTHER; note = 2'-O-methoxyethyl modified 5-methylcytosine
  modified_base 2: mod_base = OTHER; note = 2'-O-methoxyethyl modified thymine
  modified_base 3: mod_base = OTHER; note = 2'-O-methoxyethyl modified thymine
  modified_base 4: mod_base = OTHER; note = 2'-O-methoxyethyl modified 5-methylcytosine
  modified_base 5: mod_base = OTHER; note = 2'-O-methoxyethyl modified nucleotide
  modified_base 6: mod_base = OTHER; note = 2'-O-methoxyethyl modified 5-methylcytosine
  modified_base 7: mod_base = OTHER; note = 2'-O-methoxyethyl modified 5-methylcytosine
  modified_base 8: mod_base = OTHER; note = 2'-O-methoxyethyl modified nucleotide
  modified_base 9: mod_base = OTHER; note = 2'-O-methoxyethyl modified 5-methylcytosine
  modified_base 10: mod_base = OTHER; note = 2'-O-methoxyethyl modified 5-methylcytosine
  modified_base 11: mod_base = OTHER; note = 2'-O-methoxyethyl modified nucleotide
  modified_base 12: mod_base = OTHER; note = 2'-O-methoxyethyl modified nucleotide
  modified_base 13: mod_base = OTHER; note = 2'-O-methoxyethyl modified 5-methylcytosine
  modified_base 14: mod_base = OTHER; note = 2'-O-methoxyethyl modified 5-methylcytosine
  modified_base 15: mod_base = OTHER; note = 2'-O-methoxyethyl modified thymine
  modified_base 16: mod_base = OTHER; note = 2'-O-methoxyethyl modified nucleotide
  modified_base 17: mod_base = OTHER; note = 2'-O-methoxyethyl modified 5-methylcytosine
  modified_base 18: mod_base = OTHER; note = 2'-O-methoxyethyl modified nucleotide
cttcaccaccaacctgca

SEQ ID NO: 275 - RNA, 16 nt, synthetic construct
  source 1..16: mol_type = other RNA
  modified_base 1: mod_base = OTHER; note = 2'-O-methoxyethyl modified nucleotide
  modified_base 2: mod_base = OTHER; note = 2'-O-methoxyethyl modified thymine
  modified_base 3: mod_base = OTHER; note = 2'-O-methoxyethyl modified 5-methylcytosine
  modified_base 4: mod_base = OTHER; note = 2'-O-methoxyethyl modified nucleotide
  modified_base 5: mod_base = OTHER; note = 2'-O-methoxyethyl modified nucleotide
  modified_base 6: mod_base = OTHER; note = 2'-O-methoxyethyl modified nucleotide
  modified_base 7: mod_base = OTHER; note = 2'-O-methoxyethyl modified nucleotide
  modified_base 8: mod_base = OTHER; note = 2'-O-methoxyethyl modified 5-methylcytosine
  modified_base 9: mod_base = OTHER; note = 2'-O-methoxyethyl modified nucleotide
  modified_base 10: mod_base = OTHER; note = 2'-O-methoxyethyl modified nucleotide
  modified_base 11: mod_base = OTHER; note = 2'-O-methoxyethyl modified nucleotide
  modified_base 12: mod_base = OTHER; note = 2'-O-methoxyethyl modified nucleotide
  modified_base 13: mod_base = OTHER; note = 2'-O-methoxyethyl modified 5-methylcytosine
  modified_base 14: mod_base = OTHER; note = 2'-O-methoxyethyl modified 5-methylcytosine
  modified_base 15: mod_base = OTHER; note = 2'-O-methoxyethyl modified nucleotide
  modified_base 16: mod_base = OTHER; note = 2'-O-methoxyethyl modified nucleotide
gtcaaagcggaaccag

SEQ ID NO: 276 - DNA, 1809 bp, Homo sapiens
  source 1..1809: mol_type = genomic DNA
gtgagactgggaacgctgggctggggggccagggtcgggggaattatgtgttcatctgttcatctatctgtccatcctcaaagaggactgagcaccatttatgggcaaagcattgttctaggcgctatagagcaaacaggtgaaagaggcctggtccctgccctcagagggcctccaccagaatggggacaaattagaagaaaaaaaaaaaaagccacagagccataatggtgtgtaagtgctgagtaagggtccccccaacctctgtgtgacataaggtcagagagaaggcagagctttgagataagtggggaagaggtgcccccttgggtaggctttgaagactggtttaggttctgatatatggacatagttggcaagaaagacatttcagaagaaggctgtgagaaaggcacatgtgtgatggtgaaaaggcccaggagttttcaggggacattaaagtaggttagtagcaattacatcaggtttagtggagcatgtgcctcataatggggagtggcgggagagatgtctgggcaggaagattagctttagaaactggaaggcctcaaggagtctgaggtcattggtaggccttgggatgccattaaaggtgtcagaaatattgtgatttagaagattaatccataggctgggcacggtggctcacacctgtaataccagcactttgggaggctgaggcgggcagaccacctgaggtcaggagtttgagaccaggctgaccaacatggagaaaccctgtctctactaaaaatacaaaattagccagatgtggtggcacatgcctgtaatcccagctattcgggaggctaaggcaggagaatcacttgaatctgggaggtggaggttgtagtgagccgagatcacacgattgcactctagcctgggcaacaagagtgaaactccatctcaaaaaaaaaaaattaatccataagtagagtgtatgtagtagagtagagggatgtatgttgggggatgactggaatagagccagctgggggctcggaggcatgaaagtcagatcctgaatcagaacagtgacagaagttaggaaggagctactggaaggaccctctcgggaaaggatcagtaggaattgtcagcttattggaaaggagggagcatgtctgtggggagtcacggatgactcaagaggccatgaggctggtggttgggagaccggtggcctcattgacaaccaggaaagtcaggaggaggagccagttggaggtgtgggggcgatggtgagctctgctttacaccagccgagtttaaggtgtcagtgggacattgaagtggaactgggaggtgcggggagtgagctctgagccattccagggactggggatcatgcctggggcacctccatccccatttccctggaatccagaagagttggggggtccgagctccctgtacctcaagtgaccctccatctctctcccatctctgtctctccctggtgtctgtttttcttctcctcctctccttgtctctctcccacacccctccatctctctcccacgtgtctctcccctcaccttctctccccctccatttctctctccctaatctgtctgttccctctgccatggcccccttcttcaagcagcctcccatcttgctcctgcggtccctccttccctgtctctctcacccctgtttccacaccctcacctcctaccacccccctcagcatgttccctggaagctgagggtctctggggctcagtcccggtctctctctttctctctctctctctctgtctccccgacccttccccccag

SEQ ID NO: 277 - DNA, 1633 bp, Homo sapiens
  source 1..1633: mol_type = genomic DNA
gtgagactgggaacgctgggctggggggccagggtcgggggaattatgtgttcatctgttcatctatctgtccatcctcaaagaggactgagcaccatttatgggcaaagcattgttctaggcgctatagagcaaacaggtgaaagaggcctggtccctgccctcagagggcctccaccagaatggggacaaattagaagaaaaaaaaaaaaagccacagagccataatggtgtgtaagtgctgagtaagggtccccccaacctctgtgtgacataaggtcagagagaaggcagagctttgagataagtggggaagaggtgcccccttgggtaggctttgaagactggtttaggttctgatatatggacatagttggcaagaaagacatttcagaagaaggctgtgagaaaggcacatgtgtgatggtgaaaaggcccaggagttttcaggggacattaaagtaggttagtagcaattacatcaggtttagtggagcatgtgcctcataatggggagtggcgggagagatgtctgggcaggaagattagctttagaaactggaaggcctcaaggagtctgaggtcattggtaggccttgggatgccattaaaggtgtcagaaatattgtgatttagaagattaatccataggctgggcacggtggctcacacctgtaataccagcactttgggaggctgaggcgggcagaccacctgaggtcaggagtttgagaccaggctgaccaacatggagaaaccctgtctctactaaaaatacaaaattagccagatgtggtggcacatgcctgtaatcccagctattcgggaggctaaggcaggagaatcacttgaatctgggaggtggaggttgtagtgagccgagatcacacgattgcactctagcctgggcaacaagagtgaaactccatctcaaaaaaaaaaaattaatccataagtagagtgtatgtagtagagtagagggatgtatgttgggggatgactggaatagagccagctgggggctcggaggcatgaaagtcagatcctgaatcagaacagtgacagaagttaggaaggagctactggaaggaccctctcgggaaaggatcagtaggaattgtcagcttattggaaaggagggagcatgtctgtggggagtcacggatgactcaagaggccatgaggctggtggttgggagaccggtggcctcattgacaaccaggaaagtcaggaggaggagccagttggaggtgtgggggcgatggtgagctctgctttacaccagccgagtttaaggtgtcagtgggacattgaagtggaactgggaggtgcggggagtgagctctgagccattccagggactggggatcatgcctggggcacctccatccccatttccctggaatccagaagagttggggggtccgagctccctgtacctcaagtgaccctccatctctctcccatctctgtctctccctggtgtctgtttttcttctcctcctctccttgtctctctcccacacccctccatctctctcccacgtgtctctcccctcaccttctctccccctccatttctctctccctaatctgtctgttccctctgccatggcccccttcttcaagcag

SEQ ID NO: 278 - DNA, 237 bp, Homo sapiens
  source 1..237: mol_type = genomic DNA
cgtgttcccgagggagctgaaggaggtgtttgcttcgtggcggctgcgctgcgcagagcgaggccgggaggacatcgcagacaggcttatcagcgcctcactcttcctgcgcttcctctgcccagcgattatgtcgcccagtctctttgggcttatgcaggagtacccagatgagcagacctcacgaaccctcaccctcattgccaaggtcatccagaacctggccaacttttccaa

SEQ ID NO: 279 - DNA, 413 bp, Homo sapiens
  source 1..413: mol_type = genomic DNA
cctcccatcttgctcctgcggtccctccttccctgtctctctcacccctgtttccacaccctcacctcctaccacccccctcagcatgttccctggaagctgagggtctctggggctcagtcccggtctctctctttctctctctctctctctgtctccccgacccttccccccagcgtgttcccgagggagctgaaggaggtgtttgcttcgtggcggctgcgctgcgcagagcgaggccgggaggacatcgcagacaggcttatcagcgcctcactcttcctgcgcttcctctgcccagcgattatgtcgcccagtctctttgggcttatgcaggagtacccagatgagcagacctcacgaaccctcaccctcattgccaaggtcatccagaacctggccaacttttccaa

SEQ ID NO: 280 - DNA, 3826 bp, Homo sapiens
  source 1..3826: mol_type = genomic DNA
gtggaaattacaatgtcatttatcttctccgtgtcccatccccatccatcccactgtctttcgtgcactcactacaccagccacctagccccatcaccatctgtctctcatagtctgctgtttgtccactggctgctcctggcagccccctagtgaccccatcttcatcccatcgtctgtgcctttgtcactcctggcagcgtcagcccaactcctgtgccttcccatccagtcttcccactcctctctgcatctcaggaccttctctaccagaaccttggtctttctgcccctagaccccacctagttccaagaacccctgccccttctttgctcactcctattcaagccacgttgttcagcttcctctgcgctcttgggccagagggctagaagctgccgttttctggaatagagcacagggcagtatgatctgtagtttctccaggccctggccggtaccctgaaaacttggggacccatcacctctgttctcttggctccctaattttcctgtctccttggcagctcctgcatagcttcctcttcctgactcttcagatcttgaaggccttccatcctgtaacctccctttgccctcagtatttaagtccagcctccctctggcctccctcccactctggccctcagaccttcccagctgcctgctgcccagcctctcttctcacaagccagcttctaggacctcccttctgcacccttaccccttgctttcccaaaattctgctcattttcctacccatactcctctttgctctgactgctaggctccccccgcctgccatccccccaccaaggctcctgaccccatgaccccactctctcccactgcagctcctcatcaggtaattctcctggttccgctttggccacgggcggaggacacagggggaggtgactccggaccactgcaggttggtcgtgaagcccactccctccaacacctccggagcctctcccctctcactgctgccctccacacccagagaacctccacagactccagccctccgacacctgcacagatccatctcccaagacaccacccaaagagagcatttgctgctgcttcccagaactgtccaacaataccttagcaacaccaagagttgggccctagatgggcccagcacattcacaggtcacacccacttccctgcaaaacccaccccctcccagcctcctcctgactctaagccctcctcttcctctacctctccagtgtatgtctgtcaccccccatttcaccagagcgtccttaggggctgggggtgggtttgttaatggggtggaggcaatgatgggttggaggatcttggctataggggctgtgctgactgcagcaggtaggttgggtttccctcttccttccctaatcttggttctctaccctcctttccactcctcacctgattctctctcttcctcctccttatatctgtgaggcagaaggcatctgaagctcatattagcccccattgggtgggaattaggagtgggtagttaactcagggagacttgagataccctggaaaaaatgctattgagatgtcctgacattaggcagggtggatggaacaagaaggagcaagaaaggaacctcaggcagatgttaggacatggacttgatcatgtggcctgggagtttagaaatggggagagacatcctcctagatcagatcgtgggctcagtaggcatgttgattcccagggagaggtgccaggaacagcatggtaaagaatgtactcttcacagctcacatccccaggttgctgatgccactcactccccctctcctgccatcgagtggccttgccggacacatcaccctacctaaaaagccagtaaatgagaacctgtcagctatagccatcatttctgagatgcgattttctttgggattgagctgcagtgggcagtggctccttacactgtaattttaattctctgcctgcccagcctctctgtcaaagtagctggtgatctataaagatgctaaaaggcaccaggggactttgccatttaaaggactcctgcagtgaattcttttgtaaaatgaataatggcaccctaatttatccactttctaaatttgggtccatgggggtgtccagggcatgcttatgtgctgtcaccagcagacaaacagagggaatggaatctgggggttccttccctgctctcccgccatactcaggataccctaccataagtgatttcctctcactgacttgcagaaaatgtgtgagatacccagcaagctaagaaggcagttttgctgggtatctcatacccaaggctggggtttgggtgatctgagaggttagctccttgatcctaggatggaagggagagcttatatagaagcttttacttggaaggttttgtatcctaaggtcagacatagctatattaccaagcctaaatgccatgtggcccaggaaataatttggacatttgttctaaaccacttgtggtaggtattggtctctctgcaactcagccattaattagaaattagttttgagcctgaattttaaaaagccaagtgttgcccccagcccacacacacacacacggacatgtacagtacaaaccccagataattacaacagccaaagagagaaggaagtgaatttcccaaccagaagcgtagggaaattcagatggctttcttttctcccagcagaggaacagaaggcggagctaagggcaggaaccaggagttggtcaaggagctataggaggtgatgagagtagaaccaggggtaggagctggtctggtacccctcaccctctaattgggagcccagggagaaggactgaaaagaagatgggagtggaaaagaataaagccagtttctgcttcccagggatgcagagattggggcatgctgtgtctgcagaagctcctagtcatttccgccataattgtgagagagaggggcagccctcccacaagatttttcccttcccatatcacttccctgaatccccttcctttccccccagtacagttaaacctctctctaatttggaatgttatatttgagaagatggccactgtgaataagtgacaaacggaatgacagtgtctatttaatgaaatgcatgtcttcaaaatatatacagaactcgatgaacaaggctttttccactcctcagggagcatgcattaatgaatagataggattcaaaagtctgttttctggtatgggttaaatatcccctcctacagacatatttccaccactaatttgcttagtacaccttttcttcacagataaaggaaaatgcaagctcagtttttcttcagattatgaagaaattccaaatccacaggggtttggattaatgaggttttgctgtactgcctccccttattcctcaacatgaagttcccacctcggattggggatgggtgggagggggtttcaagaggaggagggtgggatgggcaaggaatatacacaggtgaagccagagaagggttaggttgggggtgcggtgggaacttgctgttttgatctggtttcctggtgtgacactctgggttaaaggcttgaaggcccctgttaggagtctaggggtgagattctcttctctctgatcccagaggacgttaacttctactgcaggtgagaaacaaaataggaggatggtggggactgtcctgggaggagggggtggtccatggcttgtggtgtgggctggctataggggaggccactgctaggggactggcatccaggcccccttgaagcgtctcaataagtccgcgctctcctttttggtgtcttgcag

SEQ ID NO: 281 - DNA, 80 bp, Homo sapiens
  source 1..80: mol_type = genomic DNA
ctcctcatcaggtaattctcctggttccgctttggccacgggcggaggacacagggggaggtgactccggaccactgcag

SEQ ID NO: 282 - RNA, 16 nt, synthetic construct
  source 1..16: mol_type = other RNA
  modified_base 1: mod_base = OTHER; note = 2'-fluoro modified nucleotide
  modified_base 2: mod_base = OTHER; note = 2'-O-methoxyethyl modified thymine
  modified_base 3: mod_base = OTHER; note = 2'-O-methoxyethyl modified 5-methylcytosine
  modified_base 4: mod_base = OTHER; note = 2'-O-methoxyethyl modified nucleotide
  modified_base 5: mod_base = OTHER; note = 2'-O-methoxyethyl modified nucleotide
  modified_base 6: mod_base = OTHER; note = 2'-O-methoxyethyl modified nucleotide
  modified_base 7: mod_base = OTHER; note = 2'-O-methoxyethyl modified nucleotide
  modified_base 8: mod_base = OTHER; note = 2'-O-methoxyethyl modified 5-methylcytosine
  modified_base 9: mod_base = OTHER; note = 2'-O-methoxyethyl modified nucleotide
  modified_base 10: mod_base = OTHER; note = 2'-O-methoxyethyl modified nucleotide
  modified_base 11: mod_base = OTHER; note = 2'-O-methoxyethyl modified nucleotide
  modified_base 12: mod_base = OTHER; note = 2'-O-methoxyethyl modified nucleotide
  modified_base 13: mod_base = OTHER; note = 2'-O-methoxyethyl modified 5-methylcytosine
  modified_base 14: mod_base = OTHER; note = 2'-O-methoxyethyl modified 5-methylcytosine
  modified_base 15: mod_base = OTHER; note = 2'-O-methoxyethyl modified nucleotide
  modified_base 16: mod_base = OTHER; note = 2'-O-methoxyethyl modified nucleotide
gtcaaagcggaaccag

SEQ ID NO: 283 - RNA, 16 nt, synthetic construct
  source 1..16: mol_type = other RNA
  modified_base 1: mod_base = OTHER; note = 2'-O-methoxyethyl modified nucleotide
  modified_base 2: mod_base = OTHER; note = 2'-O-methoxyethyl modified thymine
  modified_base 3: mod_base = OTHER; note = 2'-O-methoxyethyl modified 5-methylcytosine
  modified_base 4: mod_base = OTHER; note = 2'-O-methoxyethyl modified nucleotide
  modified_base 5: mod_base = OTHER; note = 2'-O-methoxyethyl modified nucleotide
  modified_base 6: mod_base = OTHER; note = 2'-O-methoxyethyl modified nucleotide
  modified_base 7: mod_base = OTHER; note = 2'-O-methoxyethyl modified nucleotide
  modified_base 8: mod_base = OTHER; note = 2'-O-methoxyethyl modified 5-methylcytosine
  modified_base 9: mod_base = OTHER; note = 2'-O-methoxyethyl modified nucleotide
  modified_base 10: mod_base = OTHER; note = 2'-O-methoxyethyl modified nucleotide
  modified_base 11: mod_base = OTHER; note = 2'-O-methoxyethyl modified nucleotide
  modified_base 12: mod_base = OTHER; note = 2'-fluoro modified nucleotide
  modified_base 13: mod_base = OTHER; note = 2'-O-methoxyethyl modified 5-methylcytosine
  modified_base 14: mod_base = OTHER; note = 2'-O-methoxyethyl modified 5-methylcytosine
  modified_base 15: mod_base = OTHER; note = 2'-O-methoxyethyl modified nucleotide
  modified_base 16: mod_base = OTHER; note = 2'-O-methoxyethyl modified nucleotide
gtcaaagcggaaccag

SEQ ID NO: 284 - RNA, 16 nt, synthetic construct
  source 1..16: mol_type = other RNA
  modified_base 1: mod_base = OTHER; note = 2'-fluoro modified nucleotide
  modified_base 2: mod_base = OTHER; note = 2'-O-methoxyethyl modified thymine
  modified_base 3: mod_base = OTHER; note = 2'-O-methoxyethyl modified 5-methylcytosine
  modified_base 4: mod_base = OTHER; note = 2'-O-methoxyethyl modified nucleotide
  modified_base 5: mod_base = OTHER; note = 2'-O-methoxyethyl modified nucleotide
  modified_base 6: mod_base = OTHER; note = 2'-O-methoxyethyl modified nucleotide
  modified_base 7: mod_base = OTHER; note = 2'-O-methoxyethyl modified nucleotide
  modified_base 8: mod_base = OTHER; note = 2'-O-methoxyethyl modified 5-methylcytosine
  modified_base 9: mod_base = OTHER; note = 2'-O-methoxyethyl modified nucleotide
  modified_base 10: mod_base = OTHER; note = 2'-O-methoxyethyl modified nucleotide
  modified_base 11: mod_base = OTHER; note = 2'-O-methoxyethyl modified nucleotide
  modified_base 12: mod_base = OTHER; note = 2'-fluoro modified nucleotide
  modified_base 13: mod_base = OTHER; note = 2'-O-methoxyethyl modified 5-methylcytosine
  modified_base 14: mod_base = OTHER; note = 2'-O-methoxyethyl modified 5-methylcytosine
  modified_base 15: mod_base = OTHER; note = 2'-O-methoxyethyl modified nucleotide
  modified_base 16: mod_base = OTHER; note = 2'-O-methoxyethyl modified nucleotide
gtcaaagcggaaccag

SEQ ID NO: 285 - RNA, 16 nt, synthetic construct
  source 1..16: mol_type = other RNA
  modified_base 1: mod_base = OTHER; note = 2'-O-methoxyethyl modified nucleotide
  modified_base 2: mod_base = OTHER; note = 2'-O-methoxyethyl modified 5-methylcytosine
  modified_base 3: mod_base = OTHER; note = 2'-O-methoxyethyl modified 5-methylcytosine
  modified_base 4: mod_base = OTHER; note = 2'-O-methoxyethyl modified nucleotide
  modified_base 5: mod_base = OTHER; note = 2'-O-methoxyethyl modified nucleotide
  modified_base 6: mod_base = OTHER; note = 2'-O-methoxyethyl modified nucleotide
  modified_base 7: mod_base = OTHER; note = 2'-O-methoxyethyl modified nucleotide
  modified_base 8: mod_base = OTHER; note = 2'-O-methoxyethyl modified 5-methylcytosine
  modified_base 9: mod_base = OTHER; note = 2'-O-methoxyethyl modified nucleotide
  modified_base 10: mod_base = OTHER; note = 2'-O-methoxyethyl modified nucleotide
  modified_base 11: mod_base = OTHER; note = 2'-O-methoxyethyl modified nucleotide
  modified_base 12: mod_base = OTHER; note = 2'-fluoro modified nucleotide
  modified_base 13: mod_base = OTHER; note = 2'-O-methoxyethyl modified 5-methylcytosine
  modified_base 14: mod_base = OTHER; note = 2'-O-methoxyethyl modified 5-methylcytosine
  modified_base 15: mod_base = OTHER; note = 2'-O-methoxyethyl modified nucleotide
  modified_base 16: mod_base = OTHER; note = 2'-O-methoxyethyl modified nucleotide
gccaaagcggaaccag

What is claimed is:

1. A compound of Formula (I): [chemical structure]
wherein
X_{A} is [chemical structure]
and B_{A} is [chemical structure]
X₂ is [chemical structure]
X₃ is [chemical structure]
X₄ is [chemical structure]
X₅ is [chemical structure]
X₆ is [chemical structure]
X₇ is [chemical structure]
X₈ is [chemical structure]
X₉ is [chemical structure]
X₁₀ is [chemical structure]
X₁₁ is [chemical structure]
X₁₂ is [chemical structure]
X₁₃ is [chemical structure]
X₁₄ is [chemical structure]
X₁₅ is [chemical structure]
X₁₆ is [chemical structure]
X₁₇ is [chemical structure]
and X_{B} is [chemical structure]
and B_{B} is

[chemical structure]

2. The compound of claim 1, wherein
X₂ is [chemical structure]
X₅ is [chemical structure]
X₇ is [chemical structure]
X₈ is [chemical structure]
X₉ is [chemical structure]
X₁₀ is [chemical structure]
X₁₁ is [chemical structure]
X₁₂ is [chemical structure]
X₁₄ is [chemical structure]
X₁₆ is [chemical structure]
and X_{B} is [chemical structure]
and B_{B} is

[chemical structure]

3. The compound of claim 1, wherein
X₂ is [chemical structure]
X₅ is [chemical structure]
X₇ is [chemical structure]
X₈ is [chemical structure]
X₉ is [chemical structure]
X₁₀ is [chemical structure]
X₁₁ is [chemical structure]
X₁₂ is [chemical structure]
X₁₄ is [chemical structure]
X₁₆ is [chemical structure]
and X_{B} is

[chemical structure]

4. The compound of claim 1, wherein
X₂ is [chemical structure]
X₅ is [chemical structure]
X₇ is [chemical structure]
X₈ is [chemical structure]
X₉ is [chemical structure]
X₁₀ is [chemical structure]
X₁₁ is [chemical structure]
X₁₂ is [chemical structure]
X₁₄ is [chemical structure]
X₁₆ is [chemical structure]
and X_{B} is

[chemical structure]

5. The compound of claim 1, wherein
X₂ is [chemical structure]
X₅ is [chemical structure]
X₇ is [chemical structure]
X₈ is [chemical structure]
X₉ is [chemical structure]
X₁₀ is [chemical structure]
X₁₁ is [chemical structure]
X₁₂ is [chemical structure]
X₁₄ is [chemical structure]
X₁₆ is [chemical structure]
and X_{B} is

[chemical structure]

6. The compound o claim 1, wherein
X₂ is [chemical structure]
X₅ is [chemical structure]
X₇ is [chemical structure]
X₈ is [chemical structure]
X₉ is [chemical structure]
X₁₀ is [chemical structure]
X₁₁ is [chemical structure]
X₁₂ is [chemical structure]
X₁₄ is [chemical structure]
X₁₆ is [chemical structure]
and X_{B} is

[chemical structure]

7. The compound of claim 1, wherein
X₂ is [chemical structure]
X₅ is [chemical structure]
X₇ is [chemical structure]
X₈ is [chemical structure]
X₉ is [chemical structure]
X₁₀ is [chemical structure]
X₁₁ is [chemical structure]
X₁₂ is [chemical structure]
X₁₄ is [chemical structure]
X₁₆ is [chemical structure]
and X_{B} is

[chemical structure]

8. The compound of claim 1, wherein
X₂ is [chemical structure]
X₅ is [chemical structure]
X₇ is [chemical structure]
X₈ is [chemical structure]
X₉ is [chemical structure]
X₁₀ is [chemical structure]
X₁₁ is [chemical structure]
X₁₂ is [chemical structure]
X₁₄ is [chemical structure]
X₁₆ is [chemical structure]
and X_{B} is

[chemical structure]

9. A compound of Formula (I):
(SEQ ID NO: 1)
X_{A}X₂X₃X₄X₅X₆X₇X₈X₉X₁₀X₁₁X₁₂X₁₃X₁₄X₁₅X₁₆X₁₇X_{B}
wherein
X_{A} is [chemical structure]
and B_{A} is [chemical structure]
X₂ is [chemical structure]
X₃ is [chemical structure]
X₄ is [chemical structure]
X₅ is [chemical structure]
X₆ is [chemical structure]
X₇ is [chemical structure]
X₈ is [chemical structure]
X₉ is [chemical structure]
X₁₀ is [chemical structure]
X₁₁ is [chemical structure]
X₁₂ is [chemical structure]
X₁₃ is [chemical structure]
X₁₄ is [chemical structure]
X₁₅ is [chemical structure]
X₁₆ is [chemical structure]
X₁₇ is [chemical structure]
and X_{B} is [chemical structure]
and
B_{B} is

[chemical structure]

10. A compound of Formula (I):
(SEQ ID NO: 2)
X_{A}X₂X₃X₄X₅X₆X₇X₈X₉X₁₀X₁₁X₁₂X₁₃X₁₄X₁₅X_{B}
wherein
X_{A} is [chemical structure]
and B_{A} is [chemical structure]
X₂ is [chemical structure]
X₃ is [chemical structure]
X₄ is [chemical structure]
X₅ is [chemical structure]
X₆ is [chemical structure]
X₇ is [chemical structure]
X₈ is [chemical structure]
X₉ is [chemical structure]
X₁₀ is [chemical structure]
X₁₁ is [chemical structure]
X₁₂ is [chemical structure]
X₁₃ is [chemical structure]
X₁₄ is [chemical structure]
X₁₅ is [chemical structure]
and X_{B} is [chemical structure]
and B_{B} is

[chemical structure]

11. The compound of claim 10, wherein
X_{A} is [chemical structure]
X₇ is [chemical structure]
X₈ is [chemical structure]
X₉ is [chemical structure]
X₁₀ is [chemical structure]
X₁₃ is [chemical structure]
and X_{B} is

[chemical structure]

12. The compound of claim 10, wherein
X_{A} is [chemical structure]
X₇ is [chemical structure]
X₈ is [chemical structure]
X₉ is [chemical structure]
X₁₀ is [chemical structure]
X₁₃ is [chemical structure]
and X_{B} is

[chemical structure]

13. The compound of claim 10, wherein
X_{A} is [chemical structure]
X₇ is [chemical structure]
X₈ is [chemical structure]
X₉ is [chemical structure]
X₁₀ is [chemical structure]
X₁₃ is [chemical structure]
and X_{B} is

[chemical structure]

14. The compound of claim 10, wherein
X_{A} is [chemical structure]
X₇ is [chemical structure]
X₈ is [chemical structure]
X₉ is [chemical structure]
X₁₀ is [chemical structure]
X₁₃ is [chemical structure]
and X_{B} is

[chemical structure]

15. The compound of claim 10, wherein
X_{A} is [chemical structure]
X₇ is [chemical structure]
X₈ is [chemical structure]
X₉ is [chemical structure]
X₁₀ is [chemical structure]
X₁₃ is [chemical structure]
and X_{B} is

[chemical structure]

16. The compound of claim 10, wherein
X_{A} is [chemical structure]
X₇ is [chemical structure]
X₈ is [chemical structure]
X₉ is [chemical structure]
X₁₀ is [chemical structure]
X₁₃ is [chemical structure]
and X_{B} is

[chemical structure]

17. The compound of claim 10, wherein
X_{A} is [chemical structure]
X₇ is [chemical structure]
X₈ is [chemical structure]
X₉ is [chemical structure]
X₁₀ is [chemical structure]
X₁₃ is [chemical structure]
and X_{B} is

[chemical structure]

18. The compound of claim 10, wherein
X_{A} is [chemical structure]
X₇ is [chemical structure]
X₈ is [chemical structure]
X₉ is [chemical structure]
X₁₀ is [chemical structure]
X₁₃ is [chemical structure]
and X_{B} is

[chemical structure]

19. A compound of Formula (I):
(SEQ ID NO: 3)
X_{A}X₂X₃X₄X₅X₆X₇X₈X₉X₁₀X₁₁X₁₂X₁₃X₁₄X₁₅X_{B}
wherein
X_{A} is [chemical structure]
and B_{A} is [chemical structure]
X₂ is [chemical structure]
X₃ is [chemical structure]
X₄ is [chemical structure]
X₅ is [chemical structure]
X₆ is [chemical structure]
X₇ is [chemical structure]
X₈ is [chemical structure]
X₉ is [chemical structure]
X₁₀ is [chemical structure]
X₁₁ is [chemical structure]
X₁₂ is [chemical structure]
X₁₃ is [chemical structure]
or absent; X₁₄ is [chemical structure]
or absent;
X₁₅ is [chemical structure]
or absent; and X_{B} is [chemical structure]
and B_{B} is [chemical structure]
when each of X₁₃ X₁₄ and X₁₅ is absent, [chemical structure]
when X₁₃ is [chemical structure]
and each of X₁₄ and X₁₅ is absent, [chemical structure]
when X₁₃ is [chemical structure]
X₁₄ is [chemical structure]
and X₁₅ is absent, or [chemical structure]
when X₁₃ is [chemical structure]
X₁₄ is [chemical structure]
and
X₁₅ is

[chemical structure]

20. The compound of claim 19, wherein:
X₁₃ is [chemical structure]
X₁₄ is [chemical structure]
and X₁₅ is

[chemical structure]

21. The compound of claim 19, wherein:
X₁₃ is [chemical structure]
X₁₄ is [chemical structure]
and X₁₅ is absent.

22. The compound of claim 19, wherein:
X₁₃ is [chemical structure]
and each of X₁₄ and X₁₅ is absent.

23. The compound of claim 19, wherein each of X₁₃, X₁₄, and X₁₅ is absent.

24. A compound of Formula (I):
(SEQ ID NO: 4)
X_{A}X₂X₃X₄X₅X₆X₇X₈X₉X₁₀X₁₁X₁₂X₁₃X₁₄X₁₅X_{B}
wherein
X_{A} is [chemical structure]
and B_{A} is [chemical structure]
X₂ is [chemical structure]
X₃ is [chemical structure]
X₄ is [chemical structure]
X₅ is [chemical structure]
X₆ is [chemical structure]
X₇ is [chemical structure]
X₈ is [chemical structure]
X₉ is [chemical structure]
X₁₀ is [chemical structure]
X₁₁ is [chemical structure]
X₁₂ is [chemical structure]
X₁₃ is [chemical structure]
and X₁₄ is [chemical structure]
X₁₅ is [chemical structure]
X_{B} is [chemical structure]
and B_{B} is

[chemical structure]

25. A compound of Formula (I):
(SEQ ID NO: 5)
X_{A}X₂X₃X₄X₅X₆X₇X₈X₉X₁₀X₁₁X₁₂X₁₃X₁₄X_{B}
wherein:
X_{A} is [chemical structure]
and B_{A} is [chemical structure]
X₂ is [chemical structure]
X₃ is [chemical structure]
X₄ is [chemical structure]
X₅ is [chemical structure]
X₆ is [chemical structure]
X₇ is [chemical structure]
X₈ is [chemical structure]
X₉ is [chemical structure]
X₁₀ is [chemical structure]
X₁₁ is [chemical structure]
X₁₂ is [chemical structure]
X₁₃ is [chemical structure]
X₁₄ is [chemical structure]
and
X_{B} is [chemical structure]
and B_{B} is

[chemical structure]

26. A compound of Formula (I):
(SEQ ID NO: 6)
X_{A}X₂X₃X₄X₅X₆X₇X₈X₉X₁₀X₁₁X₁₂X₁₃X_{B}
wherein
X_{A} is [chemical structure]
and B_{A} is [chemical structure]
X₂ is [chemical structure]
X₃ is [chemical structure]
X₄ is [chemical structure]
X₅ is [chemical structure]
X₆ is [chemical structure]
X₇ is [chemical structure]
X₈ is [chemical structure]
X₉ is [chemical structure]
X₁₀ is [chemical structure]
X₁₁ is [chemical structure]
X₁₂ is [chemical structure]
X₁₃ is [chemical structure]
and X_{B} is [chemical structure]
and B_{B} is

[chemical structure]

27. A compound of Formula (I): [chemical structure]
wherein
X_{A} is [chemical structure]
and B_{A} is [chemical structure]
X₂ is [chemical structure]
X₃ is [chemical structure]
X₄ is [chemical structure]
X₅ is [chemical structure]
X₆ is [chemical structure]
X₇ is [chemical structure]
X₈ is [chemical structure]
X₉ is [chemical structure]
X₁₀ is [chemical structure]
X₁₁ is [chemical structure]
X₁₂ is [chemical structure]
X₁₃ is [chemical structure]
and X₁₄ is [chemical structure]
X₁₅ is [chemical structure]
and
X_{B} is [chemical structure]
and B_{B} is

[chemical structure]

28. The compound of claim 27, wherein
X_{A} is [chemical structure]
X₇ is [chemical structure]
X₈ is [chemical structure]
X₉ is [chemical structure]
X₁₀ is [chemical structure]
X₁₂ is [chemical structure]
X₁₃ is [chemical structure]
and X_{B} is

[chemical structure]

29. The compound of claim 27, wherein
X_{A} is [chemical structure]
X₇ is [chemical structure]
X₈ is [chemical structure]
X₉ is [chemical structure]
X₁₀ is [chemical structure]
X₁₂ is [chemical structure]
X₁₃ is [chemical structure]
and X_{B} is

[chemical structure]

30. A compound selected from the group consisting of (SEQ ID NOs: 7-16, 1, 18-25, and 25-29 disclosed below, respectively, in order of appearance): [chemical structure] [chemical structure] [chemical structure] [chemical structure] [chemical structure] [chemical structure] [chemical structure] [chemical structure] [chemical structure] [chemical structure] [chemical structure] [chemical structure] [chemical structure] [chemical structure] [chemical structure] [chemical structure] [chemical structure] [chemical structure] [chemical structure] [chemical structure] [chemical structure] [chemical structure] [chemical structure] [chemical structure]
